(19) United States
(12) Patent Application Publication
(10) Pub. No.: US 2003/0104413 A1
(43) Pub. Date: Jun. 5, 2003

(54) Novel Nucleic acids and polypeptides

(76) Inventors: Y. Tom Tang, San Jose, CA (US); Chenghua Liu, San Jose, CA (US); Vinod Asundi, Foster City, CA (US); Jie Zhang, Cupertino, CA (US); Feiyan Ren, Cupertino, CA (US); Qing A. Zhao, San Jose, CA (US); Rui-Hong Chen, Foster City, CA (US); Tom Wehrman, Stanford, CA (US); Ping Zhou, San Jose, CA (US); Chongjun Xu, San Jose, CA (US); Yonghong Yang, San Jose, CA (US); Aidong J. Xue, Sunnyvale, CA (US); Radoje T. Drmanac, Palo Alto, CA (US)

Correspondence Address: Petrina S. Hsi, HYSEQ, INC., 670 Almanor Avenue, Sunnyvale, CA, 94085, US

(21) Appl. No.: 10/119,926

(22) Filed: Apr. 9, 2002

Related U.S. Application Data
(63) Continuation of application No. 09/616,847, filed on Jul. 14, 2000, now abandoned.

(51) Int. Cl. C12Q 1/68; C07H 21/04; C12N 9/00; C12P 21/02; C12N 5/06; C07K 14/435

(52) U.S. Cl. 435/6; 435/69.1; 435/183; 435/320.1; 435/325; 530/350; 536/23.2

(57) ABSTRACT

The present invention provides novel nucleic acids, novel polypeptide sequences encoded by these nucleic acids and uses thereof.

### 1. CROSS REFERENCE TO RELATED APPLICATIONS

[0001] This application is a continuation-in-part application of U.S. application Ser. No. 09/574,454 filed May 19, 2000, which in turn is a continuation-in-part application of U.S. application Ser. No. 09/519,705, filed Mar. 7, 2000, both of which are incorporated herein by reference in their entirety.

### 2. BACKGROUND OF THE INVENTION

[0002] 2.1 Technical Field

[0003] The present invention provides novel polynucleotides and proteins encoded by such polynucleotides, along with uses for these polynucleotides and proteins, for example in therapeutic, diagnostic and research methods.

[0004] 2.2 Background

[0005] Technology aimed at the discovery of protein factors (including e.g., cytokines, such as lymphokines, interferons, CSFs, chemokines, and interleukins) has matured rapidly over the past decade. The now routine hybridization cloning and expression cloning techniques clone novel polynucleotides “directly” in the sense that they rely on information directly related to the discovered protein (i.e., partial DNA/amino acid sequence of the protein in the case of hybridization cloning; activity of the protein in the case of expression cloning). More recent “indirect” cloning techniques such as signal sequence cloning, which isolates DNA sequences based on the presence of a now well-recognized secretory leader sequence motif, as well as various PCR-based or low stringency hybridization-based cloning techniques, have advanced the state of the art by making available large numbers of DNA/amino acid sequences for proteins that are known to have biological activity, for example, by virtue of their secreted nature in the case of leader sequence cloning, by virtue of their cell or tissue source in the case of PCR-based techniques, or by virtue of structural similarity to other genes of known biological activity.

[0006] Identified polynucleotide and polypeptide sequences have numerous applications in, for example, diagnostics, forensics, gene mapping; identification of mutations responsible for genetic disorders or other traits, to assess biodiversity, and to produce many other types of data and products dependent on DNA and amino acid sequences.

### 3. SUMMARY OF THE INVENTION

[0007] The compositions of the present invention include novel isolated polypeptides, novel isolated polynucleotides encoding such polypeptides, including recombinant DNA molecules, cloned genes or degenerate variants thereof, especially naturally occurring variants such as allelic variants, antisense polynucleotide molecules, and antibodies that specifically recognize one or more epitopes present on such polypeptides, as well as hybridomas producing such antibodies.

[0008] The compositions of the present invention additionally include vectors, including expression vectors, containing the polynucleotides of the invention, cells genetically engineered to contain such polynucleotides and cells genetically engineered to express such polynucleotides.

[0009] The present invention relates to a collection or library of at least one novel nucleic acid sequence assembled from expressed sequence tags (ESTs) isolated mainly by sequencing by hybridization (SBH), and in some cases, sequences obtained from one or more public databases. The invention relates also to the proteins encoded by such polynucleotides, along with therapeutic, diagnostic and research utilities for these polynucleotides and proteins. These nucleic acid sequences are designated as SEQ ID NO: 1-108 and are provided in the Sequence Listing. In the nucleic acids provided in the Sequence Listing, A is adenosine; C is cytosine; G is guanosine; T is thymine; and N is any of the four bases. In the amino acids provided in the Sequence Listing, * corresponds to the stop codon.

[0010] The nucleic acid sequences of the present invention also include, nucleic acid sequences that hybridize to the complement of SEQ ID NO: 1-108 under stringent hybridization conditions; nucleic acid sequences which are allelic variants or species homologues of any of the nucleic acid sequences recited above, or nucleic acid sequences that encode a peptide comprising a specific domain or truncation of the peptides encoded by SEQ ID NO: 1-108. A polynucleotide comprising a nucleotide sequence having at least 90% identity to an identifying sequence of SEQ ID NO: 1-108 or a degenerate variant or fragment thereof. The identifying sequence can be 100 base pairs in length.

[0011] The nucleic acid sequences of the present invention also include the sequence information from the nucleic acid sequences of SEQ ID NO: 1-108. The sequence information can be a segment of any one of SEQ ID NO: 1-108 that uniquely identifies or represents the sequence information of SEQ ID NO: 1-108.

[0012] A collection as used in this application can be a collection of only one polynucleotide. The collection of sequence information or identifying information of each sequence can be provided on a nucleic acid array. In one embodiment, segments of sequence information is provided on a nucleic acid array to detect the polynucleotide that contains the segment. The array can be designed to detect full-match or mismatch to the polynucleotide that contains the segment. The collection can also be provided in a computer-readable format.

[0013] This invention also includes the reverse or direct complement of any of the nucleic acid sequences recited above; cloning or expression vectors containing the nucleic acid sequences; and host cells or organisms transformed with these expression vectors. Nucleic acid sequences (or their reverse or direct complements) according to the invention have numerous applications in a variety of techniques known to those skilled in the art of molecular biology, such as use as hybridization probes, use as primers for PCR, use in an array, use in computer-readable media, use in sequencing fill-length genes, use for chromosome and gene mapping, use in the recombinant production of protein, and use in the generation of anti-sense DNA or RNA, their chemical analogs and the like.

[0014] In a preferred embodiment, the nucleic acid sequences of SEQ ID NO: 1-108 or novel segments or parts of the nucleic acids of the invention are used as primers in expression assays that are well known in the art. In a particularly preferred embodiment, the nucleic acid sequences of SEQ ID NO: 1-108 or novel segments or parts of the nucleic acids provided herein are used in diagnostics for identifying expressed genes or, as well known in the art and exemplified by Vollrath et al., Science 258:52-59 (1992), as expressed sequence tags for physical mapping of the human genome.

[0015] The isolated polynucleotides of the invention include, but are not limited to, a polynucleotide comprising any one of the nucleotide sequences set forth in the SEQ ID NO: 1-108; a polynucleotide comprising any of the full length protein coding sequences of the SEQ ID NO: 1-108; and a polynucleotide comprising any of the nucleotide sequences of the mature protein coding sequences of the SEQ ID NO: 1-108. The polynucleotides of the present invention also include, but are not limited to, a polynucleotide that hybridizes under stringent hybridization conditions to (a) the complement of any one of the nucleotide sequences set forth in the SEQ ID NO: 1-108; (b) a nucleotide sequence encoding any one of the amino acid sequences set forth in the Sequence Listing; (c) a polynucleotide which is an allelic variant of any polynucleotides recited above; (d) a polynucleotide which encodes a species homolog (e.g. orthologs) of any of the proteins recited above; or (e) a polynucleotide that encodes a polypeptide comprising a specific domain or truncation of any of the polypeptides comprising an amino acid sequence set forth in the Sequence Listing.

[0016] The isolated polypeptides of the invention include, but are not limited to, a polypeptide comprising any of the amino acid sequences set forth in the Sequence Listing; or the corresponding full length or mature protein. Polypeptides of the invention also include polypeptides with biological activity that are encoded by (a) any of the polynucleotides having a nucleotide sequence set forth in the SEQ ID NO:. 1-108; or (b) polynucleotides that hybridize to the complement of the polynucleotides of (a) under stringent hybridization conditions. Biologically or immunologically active variants of any of the polypeptide sequences in the Sequence Listing, and “substantial equivalents” thereof (e.g., with at least about 65%, 70%, 75%, 80%, 85%, 90%, 95%, 98% or 99% amino acid sequence identity) that preferably retain biological activity are also contemplated. The polypeptides of the invention may be wholly or partially chemically synthesized but are preferably produced by recombinant means using the genetically engineered cells (e.g. host cells) of the invention.

[0017] The invention also provides compositions comprising a polypeptide of the invention. Polypeptide compositions of the invention may further comprise an acceptable carrier, such as a hydrophilic, e.g., pharmaceutically acceptable, carrier.

[0018] The invention also provides host cells transformed or transfected with a polynucleotide of the invention.

[0019] The invention also relates to methods for producing a polypeptide of the invention comprising growing a culture of the host cells of the invention in a suitable culture medium under conditions permitting expression of the desired polypeptide, and purifying the polypeptide from the culture or from the host cells. Preferred embodiments include those in which the protein produced by such process is a mature form of the protein.

[0020] Polynucleotides according to the invention have numerous applications in a variety of techniques known to those skilled in the art of molecular biology. These techniques include use as hybridization probes, use as oligomers, or primers, for PCR, use for chromosome and gene mapping, use in the recombinant production of protein, and use in generation of anti-sense DNA or RNA, their chemical analogs and the like. For example, when the expression of an mRNA is largely restricted to a particular cell or tissue type, polynucleotides of the invention can be used as hybridization probes to detect the presence of the particular cell or tissue mRNA in a sample using, e.g., in situ hybridization.

[0021] In other exemplary embodiments, the polynucleotides are used in diagnostics as expressed sequence tags for identifying expressed genes or, as well known in the art and exemplified by Vollrath et al., Science 258:52-59 (1992), as expressed sequence tags for physical mapping of the human genome.

[0022] The polypeptides according to the invention can be used in a variety of conventional procedures and methods that are currently applied to other proteins. For example, a polypeptide of the invention can be used to generate an antibody that specifically binds the polypeptide. Such antibodies, particularly monoclonal antibodies, are useful for detecting or quantitating the polypeptide in tissue. The polypeptides of the invention can also be used as molecular weight markers, and as a food supplement.

[0023] Methods are also provided for preventing, treating, or ameliorating a medical condition which comprises the step of administering to a mammalian subject a therapeutically effective amount of a composition comprising a polypeptide of the present invention and a pharmaceutically acceptable carrier.

[0024] In particular, the polypeptides and polynucleotides of the invention can be utilized, for example, in methods for the prevention and/or treatment of disorders involving aberrant protein expression or biological activity.

[0025] The present invention further relates to methods for detecting the presence of the polynucleotides or polypeptides of the invention in a sample. Such methods can, for example, be utilized as part of prognostic and diagnostic evaluation of disorders as recited herein and for the identification of subjects exhibiting a predisposition to such conditions. The invention provides a method for detecting the polynucleotides of the invention in a sample, comprising contacting the sample with a compound that binds to and forms a complex with the polynucleotide of interest for a period sufficient to form the complex and under conditions sufficient to form a complex and detecting the complex such that if a complex is detected, the polynucleotide of interest is detected. The invention also provides a method for detecting the polypeptides of the invention in a sample comprising contacting the sample with a compound that binds to and forms a complex with the polypeptide under conditions and for a period sufficient to form the complex and detecting the formation of the complex such that if a complex is formed, the polypeptide is detected.

[0026] The invention also provides kits comprising polynucleotide probes and/or monoclonal antibodies, and optionally quantitative standards, for carrying out methods of the invention. Furthermore, the invention provides methods for evaluating the efficacy of drugs, and monitoring the progress of patients, involved in clinical trials for the treatment of disorders as recited above.

[0027] The invention also provides methods for the identification of compounds that modulate (i.e., increase or decrease) the expression or activity of the polynucleotides and/or polypeptides of the invention. Such methods can be utilized, for example, for the identification of compounds that can ameliorate symptoms of disorders as recited herein. Such methods can include, but are not limited to, assays for identifying compounds and other substances that interact with (e.g., bind to) the polypeptides of the invention. The invention provides a method for identifying a compound that binds to the polypeptides of the invention comprising contacting the compound with a polypeptide of the invention in a cell for a time sufficient to form a polypeptide/compound complex, wherein the complex drives expression of a reporter gene sequence in the cell; and detecting the complex by detecting the reporter gene sequence expression such that if expression of the reporter gene is detected the compound the binds to a polypeptide of the invention is identified.

[0028] The methods of the invention also provides methods for treatment which involve the administration of the polynucleotides or polypeptides of the invention to individuals exhibiting symptoms or tendencies. In addition, the invention encompasses methods for treating diseases or disorders as recited herein comprising administering compounds and other substances that modulate the overall activity of the target gene products. Compounds and other substances can effect such modulation either on the level of target gene/protein expression or target protein activity.

[0029] The polypeptides of the present invention and the polynucleotides encoding them are also useful for the same functions known to one of skill in the art as the polypeptides and polynucleotides to which they have the closest homology (set forth in Table 1). If no homology is set forth for a sequence, then the polypeptides and polynucleotides of the present invention are useful for a variety of applications, as described herein, including use in arrays for detection.

### 4. DETAILED DESCRIPTION OF THE INVENTION

[0030] 4.1 Definitions

[0031] It must be noted that as used herein and in the appended claims, the singular forms “a”, “an” and “the” include plural references unless the context clearly dictates otherwise.

[0032] The term “active” refers to those forms of the polypeptide which retain the biologic and/or immunologic activities of any naturally occurring polypeptide. According to the invention, the terms “biologically active” or “biological activity” refer to a protein or peptide having structural, regulatory or biochemical functions of a naturally occurring molecule. Likewise “immunologically active” or “immunological activity” refers to the capability of the natural, recombinant or synthetic polypeptide to induce a specific immune response in appropriate animals or cells and to bind with specific antibodies.

[0033] The term “activated cells” as used in this application are those cells which are engaged in extracellular or intracellular membrane trafficking, including the export of secretory or enzymatic molecules as part of a normal or disease process.

[0034] The terms “complementary” or “complementarity” refer to the natural binding of polynucleotides by base pairing. For example, the sequence 5′-AGT-3′ binds to the complementary sequence 3′-TCA-5′. Complementarity between two single-stranded molecules may be “partial” such that only some of the nucleic acids bind or it may be “complete” such that total complementarity exists between the single stranded molecules. The degree of complementarity between the nucleic acid strands has significant effects on the efficiency and strength of the hybridization between the nucleic acid strands.

[0035] The term “embryonic stem cells (ES)” refers to a cell that can give rise to many differentiated cell types in an embryo or an adult, including the germ cells. The term “germ line stem cells (GSCs)” refers to stem cells derived from primordial stem cells that provide a steady and continuous source of germ cells for the production of gametes. The term “primordial germ cells (PGCs)” refers to a small population of cells set aside from other cell lineages particularly from the yolk sac, mesenteries, or gonadal ridges during embryogenesis that have the potential to differentiate into germ cells and other cells. PGCs are the source from which GSCs and ES cells are derived The PGCs, the GSCs and the ES cells are capable of self-renewal. Thus these cells not only populate the germ line and give rise to a plurality of terminally differentiated cells that comprise the adult specialized organs, but are able to regenerate themselves.

[0036] The term “expression modulating fragment,” EMF, means a series of nucleotides which modulates the expression of an operably linked ORF or another EMF.

[0037] As used herein, a sequence is said to “modulate the expression of an operably linked sequence” when the expression of the sequence is altered by the presence of the EMF. EMFs include, but are not limited to, promoters, and promoter modulating sequences (inducible elements). One class of EMFs are nucleic acid fragments which induce the expression of an operably linked ORF in response to a specific regulatory factor or physiological event.

[0038] The terms “nucleotide sequence” or “nucleic acid” or “polynucleotide” or “oligonculeotide” are used interchangeably and refer to a heteropolymer of nucleotides or the sequence of these nucleotides. These phrases also refer to DNA or RNA of genomic or synthetic origin which may be single-stranded or double-stranded and may represent the sense or the antisense strand, to peptide nucleic acid (PNA) or to any DNA-like or RNA-like material. Generally, nucleic acid segments provided by this invention may be assembled from fragments of the genome and short oligonucleotide linkers, or from a series of oligonucleotides, or from individual nucleotides, to provide a synthetic nucleic acid which is capable of being expressed in a recombinant transcriptional unit comprising regulatory elements derived from a microbial or viral operon, or a eukaryotic gene.

[0039] The terms “oligonucleotide fragment” or a “polynucleotide fragment”, “portion,” or “segment” or “probe” or “primer” are used interchangeable and refer to a sequence of nucleotide residues which are at least about 5 nucleotides, more preferably at least about 7 nucleotides, more preferably at least about 9 nucleotides, more preferably at least about 11 nucleotides and most preferably at least about 17 nucleotides. The fragment is preferably less than about 500 nucleotides, preferably less than about 200 nucleotides, more preferably less than about 100 nucleotides, more preferably less than about 50 nucleotides and most preferably less than 30 nucleotides. Preferably the probe is from about 6 nucleotides to about 200 nucleotides, preferably from about 15 to about 50 nucleotides, more preferably from about 17 to 30 nucleotides and most preferably from about 20 to 25 nucleotides. Preferably the fragments can be used in polymerase chain reaction (PCR), various hybridization procedures or microarray procedures to identify or amplify identical or related parts of mRNA or DNA molecules. A fragment or segment may uniquely identify each polynucleotide sequence of the present invention. Preferably the fragment comprises a sequence substantially similar to any one of SEQ ID NOs: 1-108.

[0040] Probes may, for example, be used to determine whether specific mRNA molecules are present in a cell or tissue or to isolate similar nucleic acid sequences from chromosomal DNA as described by Walsh et al. (Walsh, P. S. et al., 1992, PCR Methods Appl 1:241-250). They may be labeled by nick translation, Klenow fill-in reaction, PCR, or other methods well known in the art. Probes of the present invention, their preparation and/or labeling are elaborated in Sambrook, J. et al., 1989, Molecular Cloning: A Laboratory Manual, Cold Spring Harbor Laboratory, NY; or Ausubel, F. M. et al., 1989, Current Protocols in Molecular Biology, John Wiley & Sons, New York N.Y., both of which are incorporated herein by reference in their entirety.

[0041] The nucleic acid sequences of the present invention also include the sequence information from the nucleic acid sequences of SEQ ID NOs: 1-108. The sequence information can be a segment of any one of SEQ ID NOs: 1-108 that uniquely identifies or represents the sequence information of that sequence of SEQ ID NO: 1-108. One such segment can be a twenty-mer nucleic acid sequence because the probability that a twenty-mer is fully matched in the human genome is 1 in 300. In the human genome, there are three billion base pairs in one set of chromosomes. Because 4²⁰ possible twenty-mers exist, there are 300 times more twenty-mers than there are base pairs in a set of human chromosome. Using the same analysis, the probability for a seventeen-mer to be fully matched in the human genome is approximately 1 in 5. When these segments are used in arrays for expression studies, fifteen-mer segments can be used. The probability that the fifteen-mer is fully matched in the expressed sequences is also approximately one in five because expressed sequences comprise less than approximately 5% of the entire genome sequence.

[0042] Similarly, when using sequence information for detecting a single mismatch, a segment can be a twenty-five mer. The probability that the twenty-five mer would appear in a human genome with a single mismatch is calculated by multiplying the probability for a full match (1÷4²⁵) times the increased probability for mismatch at each nucleotide position (3×25). The probability that an eighteen mer with a single mismatch can be detected in an array for expression studies is approximately one in five. The probability that a twenty-mer with a single mismatch can be detected in a human genome is approximately one in five.

[0043] The term “open reading frame,” ORF, means a series of nucleotide triplets coding for amino acids without any termination codons and is a sequence translatable into protein.

[0044] The terms “operably linked” or “operably associated” refer to functionally related nucleic acid sequences. For example, a promoter is operably associated or operably linked with a coding sequence if the promoter controls the transcription of the coding sequence. While operably linked nucleic acid sequences can be contiguous and in the same reading frame, certain genetic elements e.g. repressor genes are not contiguously linked to the coding sequence but still control transcription/translation of the coding sequence.

[0045] The term “pluripotent” refers to the capability of a cell to differentiate into a number of differentiated cell types that are present in an adult organism. A pluripotent cell is restricted in its differentiation capability in comparison to a totipotent cell.

[0046] The terms “polypeptide” or “peptide” or “amino acid sequence” refer to an oligopeptide, peptide, polypeptide or protein sequence or fragment thereof and to naturally occurring or synthetic molecules. A polypeptide “fragment,” “portion,” or “segment” is a stretch of amino acid residues of at least about 5 amino acids, preferably at least about 7 amino acids, more preferably at least about 9 amino acids and most preferably at least about 17 or more amino acids. The peptide preferably is not greater than about 200 amino acids, more preferably less than 150 amino acids and most preferably less than 100 amino acids. Preferably the peptide is from about 5 to about 200 amino acids. To be active, any polypeptide must have sufficient length to display biological and/or immunological activity.

[0047] The term “naturally occurring polypeptide” refers to polypeptides produced by cells that have not been genetically engineered and specifically contemplates various polypeptides arising from post-translational modifications of the polypeptide including, but not limited to, acetylation, carboxylation, glycosylation, phosphorylation, lipidation and acylation.

[0048] The term “translated protein coding portion” means a sequence which encodes for the full length protein which may include any leader sequence or any processing sequence.

[0049] The term “mature protein coding sequence” means a sequence which encodes a peptide or protein without a signal or leader sequence. The peptide may have been produced by processing in the cell which removes any leader/signal sequence. The peptide may be produced synthetically or the protein may have been produced using a polynucleotide only encoding for the mature protein coding sequence.

[0050] The term “derivative” refers to polypeptides chemically modified by such techniques as ubiquitination, labeling (e.g., with radionuclides or various enzymes), covalent polymer attachment such as pegylation (derivatization with polyethylene glycol) and insertion or substitution by chemical synthesis of amino acids such as ornithine, which do not normally occur in human proteins.

[0051] The term “variant” (or “analog”) refers to any polypeptide differing from naturally occurring polypeptides by amino acid insertions, deletions, and substitutions, created using, e g., recombinant DNA techniques. Guidance in determining which amino acid residues may be replaced, added or deleted without abolishing activities of interest, may be found by comparing the sequence of the particular polypeptide with that of homologous peptides and minimizing the number of amino acid sequence changes made in regions of high homology (conserved regions) or by replacing amino acids with consensus sequence.

[0052] Alternatively, recombinant variants encoding these same or similar polypeptides may be synthesized or selected by making use of the “redundancy” in the genetic code. Various codon substitutions, such as the silent changes which produce various restriction sites, may be introduced to optimize cloning into a plasmid or viral vector or expression in a particular prokaryotic or eukaryotic system. Mutations in the polynucleotide sequence may be reflected in the polypeptide or domains of other peptides added to the polypeptide to modify the properties of any part of the polypeptide, to change characteristics such as ligand-binding affinities, interchain affinities, or degradation/turnover rate.

[0053] Preferably, amino acid “substitutions” are the result of replacing one amino acid with another amino acid having similar structural and/or chemical properties, i.e., conservative amino acid replacements. “Conservative” amino acid substitutions may be made on the basis of similarity in polarity, charge, solubility, hydrophobicity, hydrophilicity, and/or the amphipathic nature of the residues involved. For example, nonpolar (hydrophobic) amino acids include alanine, leucine, isoleucine, valine, proline, phenylalanine, tryptophan, and methionine; polar neutral amino acids include glycine, serine, threonine, cysteine, tyrosine, asparagine, and glutamine; positively charged (basic) amino acids include arginine, lysine, and histidine; and negatively charged (acidic) amino acids include aspartic acid and glutamic acid. “Insertions” or “deletions” are preferably in the range of about 1 to 20 amino acids, more preferably 1 to 10 amino acids. The variation allowed may be experimentally determined by systematically making insertions, deletions, or substitutions of amino acids in a polypeptide molecule using recombinant DNA techniques and assaying the resulting recombinant variants for activity.

[0054] Alternatively, where alteration of function is desired, insertions, deletions or non-conservative alterations can be engineered to produce altered polypeptides. Such alterations can, for example, alter one or more of the biological functions or biochemical characteristics of the polypeptides of the invention. For example, such alterations may change polypeptide characteristics such as ligand-binding affinities, interchain affinities, or degradation/turnover rate. Further, such alterations can be selected so as to generate polypeptides that are better suited for expression, scale up and the like in the host cells chosen for expression. For example, cysteine residues can be deleted or substituted with another amino acid residue in order to eliminate disulfide bridges.

[0055] The terms “purified” or “substantially purified” as used herein denotes that the indicated nucleic acid or polypeptide is present in the substantial absence of other biological macromolecules, e.g., polynucleotides, proteins, and the like. In one embodiment, the polynucleotide or polypeptide is purified such that it constitutes at least 95% by weight, more preferably at least 99% by weight, of the indicated biological macromolecules present (but water, buffers, and other small molecules, especially molecules having a molecular weight of less than 1000 daltons, can be present).

[0056] The term “isolated” as used herein refers to a nucleic acid or polypeptide separated from at least one other component (e.g., nucleic acid or polypeptide) present with the nucleic acid or polypeptide in its natural source. In one embodiment, the nucleic acid or polypeptide is found in the presence of (if anything) only a solvent, buffer, ion, or other component normally present in a solution of the same. The terms “isolated” and “purified” do not encompass nucleic acids or polypeptides present in their natural source.

[0057] The term “recombinant,” when used herein to refer to a polypeptide or protein, means that a polypeptide or protein is derived from recombinant (e.g., microbial, insect, or mammalian) expression systems. “Microbial” refers to recombinant polypeptides or proteins made in bacterial or fungal (e.g., yeast) expression systems. As a product, “recombinant microbial” defines a polypeptide or protein essentially free of native endogenous substances and unaccompanied by associated native glycosylation. Polypeptides or proteins expressed in most bacterial cultures, e.g., E. coli, will be free of glycosylation modifications; polypeptides or proteins expressed in yeast will have a glycosylation pattern in general different from those expressed in mammalian cells.

[0058] The term “recombinant expression vehicle or vector” refers to a plasmid or phage or virus or vector, for expressing a polypeptide from a DNA (RNA) sequence. An expression vehicle can comprise a transcriptional unit comprising an assembly of (1) a genetic element or elements having a regulatory role in gene expression, for example, promoters or enhancers, (2) a structural or coding sequence which is transcribed into mRNA and translated into protein, and (3) appropriate transcription initiation and termination sequences. Structural units intended for use in yeast or eukaryotic expression systems preferably include a leader sequence enabling extracellular secretion of translated protein by a host cell. Alternatively, where recombinant protein is expressed without a leader or transport sequence, it may include an amino terminal methionine residue. This residue may or may not be subsequently cleaved from the expressed recombinant protein to provide a final product.

[0059] The term “recombinant expression system” means host cells which have stably integrated a recombinant transcriptional unit into chromosomal DNA or carry the recombinant transcriptional unit extrachromosomally. Recombinant expression systems as defined herein will express heterologous polypeptides or proteins upon induction of the regulatory elements linked to the DNA segment or synthetic gene to be expressed. This term also means host cells which have stably integrated a recombinant genetic element or elements having a regulatory role in gene expression, for example, promoters or enhancers. Recombinant expression systems as defined herein will express polypeptides or proteins endogenous to the cell upon induction of the regulatory elements linked to the endogenous DNA segment or gene to be expressed. The cells can be prokaryotic or eukaryotic.

[0060] The term “secreted” includes a protein that is transported across or through a membrane, including transport as a result of signal sequences in its amino acid sequence when it is expressed in a suitable host cell. “Secreted” proteins include without limitation proteins secreted wholly (e.g., soluble proteins) or partially (e.g., receptors) from the cell in which they are expressed. “Secreted” proteins also include without limitation proteins that are transported across the membrane of the endoplasmic reticulum. “Secreted” proteins are also intended to include proteins containing non-typical signal sequences (e.g. Interleukin-1 Beta, see Krasney, P. A. and Young, P. R. (1992) Cytokine 4(2):134-143) and factors released from damaged cells (e.g. Interleukin-1 Receptor Antagonist, see Arend, W. P. et. al. (1998) Annu. Rev. Immunol. 16:27-55)

[0061] Where desired, an expression vector may be designed to contain a “signal or leader sequence” which will direct the polypeptide through the membrane of a cell. Such a sequence may be naturally present on the polypeptides of the present invention or provided from heterologous protein sources by recombinant DNA techniques.

[0062] The term “stringent” is used to refer to conditions that are commonly understood in the art as stringent. Stringent conditions can include highly stringent conditions (i.e., hybridization to filter-bound DNA in 0.5 M NaHPO4, 7% sodium dodecyl sulfate (SDS), 1 mM EDTA at 65° C., and washing in 0.1×SSC/0.1% SDS at 68° C.), and moderately stringent conditions (i.e., washing in 0.2×SSC/0.1% SDS at 42° C.). Other exemplary hybridization conditions are described herein in the examples.

[0063] In instances of hybridization of deoxyoligonucleotides, additional exemplary stringent hybridization conditions include washing in 6×SSC/0.05% sodium pyrophosphate at 37° C. (for 14-base oligonucleotides), 48° C. (for 17-base oligos), 55° C. (for 20-base oligonucleotides), and 60° C. (for 23-base oligonucleotides).

[0064] As used herein, “substantially equivalent” can refer both to nucleotide and amino acid sequences, for example a mutant sequence, that varies from a reference sequence by one or more substitutions, deletions, or additions, the net effect of which does not result in an adverse functional dissimilarity between the reference and subject sequences. Typically, such a substantially equivalent sequence varies from one of those listed herein by no more than about 35% (i.e., the number of individual residue substitutions, additions, and/or deletions in a substantially equivalent sequence, as compared to the corresponding reference sequence, divided by the total number of residues in the substantially equivalent sequence is about 0.35 or less). Such a sequence is said to have 65% sequence identity to the listed sequence. In one embodiment, a substantially equivalent, e.g., mutant, sequence of the invention varies from a listed sequence by no more than 30% (70% sequence identity); in a variation of this embodiment, by no more than 25% (75% sequence identity); and in a further variation of this embodiment, by no more than 20% (80% sequence identity) and in a further variation of this embodiment, by no more than 10% (90% sequence identity) and in a further variation of this embodiment, by no more that 5% (95% sequence identity). Substantially equivalent, e.g., mutant, amino acid sequences according to the invention preferably have at least 80% sequence identity with a listed amino acid sequence, more preferably at least 90% sequence identity. Substantially equivalent nucleotide sequences of the invention can have lower percent sequence identities, taking into account, for example, the redundancy or degeneracy of the genetic code. Preferably, nucleotide sequence has at least about 65% identity, more preferably at least about 75% identity, and most preferably at least about 95% identity. For the purposes of the present invention, sequences having substantially equivalent biological activity and substantially equivalent expression characteristics are considered substantially equivalent. For the purposes of determining equivalence, truncation of the mature sequence (e.g., via a mutation which creates a spurious stop codon) should be disregarded. Sequence identity may be determined, e.g., using the Jotun Hein method (Hein, J. (1990) Methods Enzymol. 183:626-645). Identity between sequences can also be determined by other methods known in the art, e.g. by varying hybridization conditions.

[0065] The term “totipotent” refers to the capability of a cell to differentiate into all of the cell types of an adult organism.

[0066] The term “transformation” means introducing DNA into a suitable host cell so that the DNA is replicable, either as an extrachromosomal element, or by chromosomal integration. The term “transfection” refers to the taking up of an expression vector by a suitable host cell, whether or not any coding sequences are in fact expressed. The term “infection” refers to the introduction of nucleic acids into a suitable host cell by use of a virus or viral vector.

[0067] As used herein, an “uptake modulating fragment,” UMF, means a series of nucleotides which mediate the uptake of a linked DNA fragment into a cell. UMFs can be readily identified using known UMFs as a target sequence or target motif with the computer-based systems described below. The presence and activity of a UMF can be confirmed by attaching the suspected UMF to a marker sequence. The resulting nucleic acid molecule is then incubated with an appropriate host under appropriate conditions and the uptake of the marker sequence is determined. As described above, a UMF will increase the frequency of uptake of a linked marker sequence.

[0068] Each of the above terms is meant to encompass all that is described for each, unless the context dictates otherwise.

[0069] 4.2 Nucleic Acids of the Invention

[0070] Nucleotide sequences of the invention are set forth in the Sequence Listing.

[0071] The isolated polynucleotides of the invention include a polynucleotide comprising the nucleotide sequences of the SEQ ID NO: 1-108; a polynucleotide encoding any one of the peptide sequences of SEQ ID NO: 1-108; and a polynucleotide comprising the nucleotide sequence encoding the mature protein coding sequence of the polynucleotides of any one of SEQ ID NO: 1-108. The polynucleotides of the present invention also include, but are not limited to, a polynucleotide that hybridizes under stringent conditions to (a) the complement of any of the nucleotides sequences of the SEQ ID NO: 1-108; (b) nucleotide sequences encoding any one of the amino acid sequences set forth in the Sequence Listing; (c) a polynucleotide which is an allelic variant of any polynucleotide recited above; (d) a polynucleotide which encodes a species homolog of any of the proteins recited above; or (e) a polynucleotide that encodes a polypeptide comprising a specific domain or truncation of the polypeptides of SEQ ID NO: 1-108. Domains of interest may depend on the nature of the encoded polypeptide; e.g., domains in receptor-like polypeptides include ligand-binding, extracellular, transmembrane, or cytoplasmic domains, or combinations thereof; domains in immunoglobulin-like proteins include the variable immunoglobulin-like domains; domains in enzyme-like polypeptides include catalytic and substrate binding domains; and domains in ligand polypeptides include receptor-binding domains.

[0072] The polynucleotides of the invention include naturally occurring or wholly or partially synthetic DNA, e.g., cDNA and genomic DNA, and RNA, e.g., mRNA. The polynucleotides may include all of the coding region of the cDNA or may represent a portion of the coding region of the cDNA.

[0073] The present invention also provides genes corresponding to the cDNA sequences disclosed herein. The corresponding genes can be isolated in accordance with known methods using the sequence information disclosed herein. Such methods include the preparation of probes or primers from the disclosed sequence information for identification and/or amplification of genes in appropriate genomic libraries or other sources of genomic materials. Further 5′ and 3′ sequence can be obtained using methods known in the art. For example, full length cDNA or genomic DNA that corresponds to any of the polynucleotides of the SEQ ID NO: 1-108 can be obtained by screening appropriate cDNA or genomic DNA libraries under suitable hybridization conditions using any of the polynucleotides of the SEQ ID NO: 1-108 or a portion thereof as a probe. Alternatively, the polynucleotides of the SEQ ID NO: 1-108 may be used as the basis for suitable primer(s) that allow identification and/or amplification of genes in appropriate genomic DNA or cDNA libraries.

[0074] The nucleic acid sequences of the invention can be assembled from ESTs and sequences (including cDNA and genomic sequences) obtained from one or more public databases, such as dbEST, gbpri, and UniGene. The EST sequences can provide identifying sequence information, representative fragment or segment information, or novel segment information for the full-length gene.

[0075] The polynucleotides of the invention also provide polynucleotides including nucleotide sequences that are substantially equivalent to the polynucleotides recited above. Polynucleotides according to the invention can have, e.g., at least about 65%, at least about 70%, at least about 75%, at least about 80%, more typically at least about 90%, and even more typically at least about 95%, sequence identity to a polynucleotide recited above.

[0076] Included within the scope of the nucleic acid sequences of the invention are nucleic acid sequence fragments that hybridize under stringent conditions to any of the nucleotide sequences of the SEQ ID NO: 1-108, or complements thereof, which fragment is greater than about 5 nucleotides, preferably 7 nucleotides, more preferably greater than 9 nucleotides and most preferably greater than 17 nucleotides. Fragments of, e.g. 15, 17, or 20 nucleotides or more that are selective for (i.e. specifically hybridize to any one of the polynucleotides of the invention) are contemplated. Probes capable of specifically hybridizing to a polynucleotide can differentiate polynucleotide sequences of the invention from other polynucleotide sequences in the same family of genes or can differentiate human genes from genes of other species, and are preferably based on unique nucleotide sequences.

[0077] The sequences falling within the scope of the present invention are not limited to these specific sequences, but also include allelic and species variations thereof. Allelic and species variations can be routinely determined by comparing the sequence provided in SEQ ID NO: 1-108, a representative fragment thereof, or a nucleotide sequence at least 90% identical, preferably 95% identical, to SEQ ID NOs: 1-108 with a sequence from another isolate of the same species. Furthermore, to accommodate codon variability, the invention includes nucleic acid molecules coding for the same amino acid sequences as do the specific ORFs disclosed herein. In other words, in the coding region of an ORF, substitution of one codon for another codon that encodes the same amino acid is expressly contemplated.

[0078] The nearest neighbor result for the nucleic acids of the present invention, including SEQ ID NOs: 1-108, can be obtained by searching a database using an algorithm or a program. Preferably, a BLAST which stands for Basic Local Alignment Search Tool is used to search for local sequence alignments (Altshul, S. F. J. Mol. Evol. 36 290-300 (1993) and Altschul S. F. et al. J. Mol. Biol. 21:403-410 (1990)). Alternatively a FASTA version 3 search against Genpept, using Fastxy algorithm.

[0079] Species homologs (or orthologs) of the disclosed polynucleotides and proteins are also provided by the present invention. Species homologs may be isolated and identified by making suitable probes or primers from the sequences provided herein and screening a suitable nucleic acid source from the desired species.

[0080] The invention also encompasses allelic variants of the disclosed polynucleotides or proteins; that is, naturally-occurring alternative forms of the isolated polynucleotide which also encode proteins which are identical, homologous or related to that encoded by the polynucleotides.

[0081] The nucleic acid sequences of the invention are further directed to sequences which encode variants of the described nucleic acids. These amino acid sequence variants may be prepared by methods known in the art by introducing appropriate nucleotide changes into a native or variant polynucleotide. There are two variables in the construction of amino acid sequence variants: the location of the mutation and the nature of the mutation. Nucleic acids encoding the amino acid sequence variants are preferably constructed by mutating the polynucleotide to encode an amino acid sequence that does not occur in nature. These nucleic acid alterations can be made at sites that differ in the nucleic acids from different species (variable positions) or in highly conserved regions (constant regions). Sites at such locations will typically be modified in series, e.g., by substituting first with conservative choices (e.g., hydrophobic amino acid to a different hydrophobic amino acid) and then with more distant choices (e.g., hydrophobic amino acid to a charged amino acid), and then deletions or insertions may be made at the target site. Amino acid sequence deletions generally range from about 1 to 30 residues, preferably about 1 to 10 residues, and are typically contiguous. Amino acid insertions include amino- and/or carboxyl-terminal fusions ranging in length from one to one hundred or more residues, as well as intrasequence insertions of single or multiple amino acid residues. Intrasequence insertions may range generally from about 1 to 10 amino residues, preferably from 1 to 5 residues. Examples of terminal insertions include the heterologous signal sequences necessary for secretion or for intracellular targeting in different host cells and sequences such as FLAG or poly-histidine sequences useful for purifying the expressed protein.

[0082] In a preferred method, polynucleotides encoding the novel amino acid sequences are changed via site-directed mutagenesis. This method uses oligonucleotide sequences to alter a polynucleotide to encode the desired amino acid variant, as well as sufficient adjacent nucleotides on both sides of the changed amino acid to form a stable duplex on either side of the site of being changed. In general, the techniques of site-directed mutagenesis are well known to those of skill in the art and this technique is exemplified by publications such as, Edelman et al., DNA 2:183 (1983). A versatile and efficient method for producing site-specific changes in a polynucleotide sequence was published by Zoller and Smith, Nucleic Acids Res. 10:6487-6500 (1982). PCR may also be used to create amino acid sequence variants of the novel nucleic acids. When small amounts of template DNA are used as starting material, primer(s) that differs slightly in sequence from the corresponding region in the template DNA can generate the desired amino acid variant. PCR amplification results in a population of product DNA fragments that differ from the polynucleotide template encoding the polypeptide at the position specified by the primer. The product DNA fragments replace the corresponding region in the plasmid and this gives a polynucleotide encoding the desired amino acid variant.

[0083] A further technique for generating amino acid variants is the cassette mutagenesis technique described in Wells et al., Gene 34:315 (1985); and other mutagenesis techniques well known in the art, such as, for example, the techniques in Sambrook et al., supra, and Current Protocols in Molecular Biology, Ausubel et al. Due to the inherent degeneracy of the genetic code, other DNA sequences which encode substantially the same or a functionally equivalent amino acid sequence may be used in the practice of the invention for the cloning and expression of these novel nucleic acids. Such DNA sequences include those which are capable of hybridizing to the appropriate novel nucleic acid sequence under stringent conditions.

[0084] Polynucleotides encoding preferred polypeptide truncations of the invention can be used to generate polynucleotides encoding chimeric or fusion proteins comprising one or more domains of the invention and heterologous protein sequences.

[0085] The polynucleotides of the invention additionally include the complement of any of the polynucleotides recited above. The polynucleotide can be DNA (genomic, cDNA, amplified, or synthetic) or RNA. Methods and algorithms for obtaining such polynucleotides are well known to those of skill in the art and can include, for example, methods for determining hybridization conditions that can routinely isolate polynucleotides of the desired sequence identities.

[0086] In accordance with the invention, polynucleotide sequences comprising the mature protein coding sequences corresponding to any one of SEQ ID NO: 1-108, or functional equivalents thereof, may be used to generate recombinant DNA molecules that direct the expression of that nucleic acid, or a functional equivalent thereof, in appropriate host cells. Also included are the cDNA inserts of any of the clones identified herein.

[0087] A polynucleotide according to the invention can be joined to any of a variety of other nucleotide sequences by well-established recombinant DNA techniques (see Sambrook J et al. (1989) Molecular Cloning: A Laboratory Manual, Cold Spring Harbor Laboratory, NY). Useful nucleotide sequences for joining to polynucleotides include an assortment of vectors, e.g., plasmids, cosmids, lambda phage derivatives, phagemids, and the like, that are well known in the art. Accordingly, the invention also provides a vector including a polynucleotide of the invention and a host cell containing the polynucleotide. In general, the vector contains an origin of replication functional in at least one organism, convenient restriction endonuclease sites, and a selectable marker for the host cell. Vectors according to the invention include expression vectors, replication vectors, probe generation vectors, and sequencing vectors. A host cell according to the invention can be a prokaryotic or eukaryotic cell and can be a unicellular organism or part of a multicellular organism.

[0088] The present invention further provides recombinant constructs comprising a nucleic acid having any of the nucleotide sequences of the SEQ ID NOs: 1-108 or a fragment thereof or any other polynucleotides of the invention. In one embodiment, the recombinant constructs of the present invention comprise a vector, such as a plasmid or viral vector, into which a nucleic acid having any of the nucleotide sequences of the SEQ ID NOs: 1-108 or a fragment thereof is inserted, in a forward or reverse orientation. In the case of a vector comprising one of the ORFs of the present invention, the vector may further comprise regulatory sequences, including for example, a promoter, operably linked to the ORF. Large numbers of suitable vectors and promoters are known to those of skill in the art and are commercially available for generating the recombinant constructs of the present invention. The following vectors are provided by way of example. Bacterial: pBs, phagescript, PsiX174, pBluescript SK, pBs KS, pNH8a, pNH16a, pNH18a, pNH46a (Stratagene); pTrc99A, pKK223-3, pKK233-3, pDR540, pRIT5 (Pharmacia). Eukaryotic: pWLneo, pSV2cat, pOG44, PXTI, pSG (Stratagene) pSVK3, pBPV, pMSG, pSVL (Pharmacia).

[0089] The isolated polynucleotide of the invention may be operably linked to an expression control sequence such as the pMT2 or pED expression vectors disclosed in Kaufnan et al., Nucleic Acids Res. 19, 4485-4490 (1991), in order to produce the protein recombinantly. Many suitable expression control sequences are known in the art. General methods of expressing recombinant proteins are also known and are exemplified in R. Kaufman, Methods in Enzymology 185, 537-566 (1990). As defined herein “operably linked” means that the isolated polynucleotide of the invention and an expression control sequence are situated within a vector or cell in such a way that the protein is expressed by a host cell which has been transformed (transfected) with the ligated polynucleotide/expression control sequence.

[0090] Promoter regions can be selected from any desired gene using CAT (chloramphenicol transferase) vectors or other vectors with selectable markers. Two appropriate vectors are pKK232-8 and pCM7. Particular named bacterial promoters include lacI, lacZ, T3, T7, gpt, lambda PR, and trc. Eukaryotic promoters include CMV immediate early, HSV thymidine kinase, early and late SV40, LTRs from retrovirus, and mouse metallothionein-I. Selection of the appropriate vector and promoter is well within the level of ordinary skill in the art. Generally, recombinant expression vectors will include origins of replication and selectable markers permitting transformation of the host cell, e.g., the ampicillin resistance gene of E. coli and S. cerevisiae TRP1 gene, and a promoter derived from a highly-expressed gene to direct transcription of a downstream structural sequence. Such promoters can be derived from operons encoding glycolytic enzymes such as 3-phosphoglycerate kinase (PGK), a-factor, acid phosphatase, or heat shock proteins, among others. The heterologous structural sequence is assembled in appropriate phase with translation initiation and termination sequences, and preferably, a leader sequence capable of directing secretion of translated protein into the periplasmic space or extracellular medium. Optionally, the heterologous sequence can encode a fusion protein including an amino terminal identification peptide imparting desired characteristics, e.g., stabilization or simplified purification of expressed recombinant product. Useful expression vectors for bacterial use are constructed by inserting a structural DNA sequence encoding a desired protein together with suitable translation initiation and termination signals in operable reading phase with a functional promoter. The vector will comprise one or more phenotypic selectable markers and an origin of replication to ensure maintenance of the vector and to, if desirable, provide amplification within the host. Suitable prokaryotic hosts for transformation include E. coli, Bacillus subtilis, Salmonella typhimurium and various species within the genera Pseudomonas, Streptomyces, and Staphylococcus, although others may also be employed as a matter of choice.

[0091] As a representative but non-limiting example, useful expression vectors for bacterial use can comprise a selectable marker and bacterial origin of replication derived from commercially available plasmids comprising genetic elements of the well known cloning vector pBR322 (ATCC 37017). Such commercial vectors include, for example, pKK223-3 (Pharmacia Fine Chemicals, Uppsala, Sweden) and GEM 1 (Promega Biotech, Madison, Wis., USA). These pBR322 “backbone” sections are combined with an appropriate promoter and the structural sequence to be expressed. Following transformation of a suitable host strain and growth of the host strain to an appropriate cell density, the selected promoter is induced or derepressed by appropriate means (e.g., temperature shift or chemical induction) and cells are cultured for an additional period. Cells are typically harvested by centrifugation, disrupted by physical or chemical means, and the resulting crude extract retained for further purification.

[0092] Polynucleotides of the invention can also be used to induce immune responses. For example, as described in Fan et al., Nat. Biotech. 17:870-872 (1999), incorporated herein by reference, nucleic acid sequences encoding a polypeptide may be used to generate antibodies against the encoded polypeptide following topical administration of naked plasmid DNA or following injection, and preferably intramuscular injection of the DNA. The nucleic acid sequences are preferably inserted in a recombinant expression vector and may be in the form of naked DNA.

[0093] 4.3 Hosts

[0094] The present invention further provides host cells genetically engineered to contain the polynucleotides of the invention. For example, such host cells may contain nucleic acids of the invention introduced into the host cell using known transformation, transfection or infection methods. The present invention still further provides host cells genetically engineered to express the polynucleotides of the invention, wherein such polynucleotides are in operative association with a regulatory sequence heterologous to the host cell which drives expression of the polynucleotides in the cell.

[0095] Knowledge of nucleic acid sequences allows for modification of cells to permit, or increase, expression of endogenous polypeptide. Cells can be modified (e.g., by homologous recombination) to provide increased polypeptide expression by replacing, in whole or in part, the naturally occurring promoter with all or part of a heterologous promoter so that the cells express the polypeptide at higher levels. The heterologous promoter is inserted in such a manner that it is operatively linked to the encoding sequences. See, for example, PCT International Publication No. WO94/12650, PCT International Publication No. WO92/20808, and PCT International Publication No. WO91/09955. It is also contemplated that, in addition to heterologous promoter DNA, amplifiable marker DNA (e.g., ada, dhfr, and the multifunctional CAD gene which encodes carbamyl phosphate synthase, aspartate transcarbamylase, and dihydroorotase) and/or intron DNA may be inserted along with the heterologous promoter DNA. If linked to the coding sequence, amplification of the marker DNA by standard selection methods results in co-amplification of the desired protein coding sequences in the cells.

[0096] The host cell can be a higher eukaryotic host cell, such as a mammalian cell, a lower eukaryotic host cell, such as a yeast cell, or the host cell can be a prokaryotic cell, such as a bacterial cell. Introduction of the recombinant construct into the host cell can be effected by calcium phosphate transfection, DEAE, dextran mediated transfection, or electroporation (Davis, L. et al., Basic Methods in Molecular Biology (1986)). The host cells containing one of the polynucleotides of the invention, can be used in conventional manners to produce the gene product encoded by the isolated fragment (in the case of an ORF) or can be used to produce a heterologous protein under the control of the EMF.

[0097] Any host/vector system can be used to express one or more of the ORFs of the present invention. These include, but are not limited to, eukaryotic hosts such as HeLa cells, Cv-1 cell, COS cells, 293 cells, and Sf9 cells, as well as prokaryotic host such as E. coli and B. subtilis. The most preferred cells are those which do not normally express the particular polypeptide or protein or which expresses the polypeptide or protein at low natural level. Mature proteins can be expressed in mammalian cells, yeast, bacteria, or other cells under the control of appropriate promoters. Cell-free translation systems can also be employed to produce such proteins using RNAs derived from the DNA constructs of the present invention. Appropriate cloning and expression vectors for use with prokaryotic and eukaryotic hosts are described by Sambrook, et al., in Molecular Cloning: A Laboratory Manual, Second Edition, Cold Spring Harbor, N.Y. (1989), the disclosure of which is hereby incorporated by reference.

[0098] Various mammalian cell culture systems can also be employed to express recombinant protein. Examples of mammalian expression systems include the COS-7 lines of monkey kidney fibroblasts, described by Gluzman, Cell 23:175 (1981). Other cell lines capable of expressing a compatible vector are, for example, the C127, monkey COS cells, Chinese Hamster Ovary (CHO) cells, human kidney 293 cells, human epidermal A431 cells, human Colo205 cells, 3T3 cells, CV-1 cells, other transformed primate cell lines, normal diploid cells, cell strains derived from in vitro culture of primary tissue, primary explants, HeLa cells, mouse L cells, BHK, HL-60, U937, HaK or Jurkat cells. Mammalian expression vectors will comprise an origin of replication, a suitable promoter and also any necessary ribosome binding sites, polyadenylation site, splice donor and acceptor sites, transcriptional termination sequences, and 5′ flanking nontranscribed sequences. DNA sequences derived from the SV40 viral genome, for example, SV40 origin, early promoter, enhancer, splice, and polyadenylation sites may be used to provide the required nontranscribed genetic elements. Recombinant polypeptides and proteins produced in bacterial culture are usually isolated by initial extraction from cell pellets, followed by one or more salting-out, aqueous ion exchange or size exclusion chromatography steps. Protein refolding steps can be used, as necessary, in completing configuration of the mature protein. Finally, high performance liquid chromatography (HPLC) can be employed for final purification steps. Microbial cells employed in expression of proteins can be disrupted by any convenient method, including freeze-thaw cycling, sonication, mechanical disruption, or use of cell lysing agents.

[0099] Alternatively, it may be possible to produce the protein in lower eukaryotes such as yeast or insects or in prokaryotes such as bacteria. Potentially suitable yeast strains include Saccharomyces cerevisiae, Schizosaccharomyces pombe, Kluyveromyces strains, Candida, or any yeast strain capable of expressing heterologous proteins. Potentially suitable bacterial strains include Escherichia coli, Bacillus subtilis, Salmonella typhimurium, or any bacterial strain capable of expressing heterologous proteins. If the protein is made in yeast or bacteria, it may be necessary to modify the protein produced therein, for example by phosphorylation or glycosylation of the appropriate sites, in order to obtain the functional protein. Such covalent attachments may be accomplished using known chemical or enzymatic methods.

[0100] In another embodiment of the present invention, cells and tissues may be engineered to express an endogenous gene comprising the polynucleotides of the invention under the control of inducible regulatory elements, in which case the regulatory sequences of the endogenous gene may be replaced by homologous recombination. As described herein, gene targeting can be used to replace a gene's existing regulatory region with a regulatory sequence isolated from a different gene or a novel regulatory sequence synthesized by genetic engineering methods. Such regulatory sequences may be comprised of promoters, enhancers, scaffold-attachment regions, negative regulatory elements, transcriptional initiation sites, regulatory protein binding sites or combinations of said sequences. Alternatively, sequences which affect the structure or stability of the RNA or protein produced may be replaced, removed, added, or otherwise modified by targeting. These sequence include polyadenylation signals, mRNA stability elements, splice sites, leader sequences for enhancing or modifying transport or secretion properties of the protein, or other sequences which alter or improve the function or stability of protein or RNA molecules.

[0101] The targeting event may be a simple insertion of the regulatory sequence, placing the gene under the control of the new regulatory sequence, e.g., inserting a new promoter or enhancer or both upstream of a gene. Alternatively, the targeting event may be a simple deletion of a regulatory element, such as the deletion of a tissue-specific negative regulatory element. Alternatively, the targeting event may replace an existing element; for example, a tissue-specific enhancer can be replaced by an enhancer that has broader or different cell-type specificity than the naturally occurring elements. Here, the naturally occurring sequences are deleted and new sequences are added. In all cases, the identification of the targeting event may be facilitated by the use of one or more selectable marker genes that are contiguous with the targeting DNA, allowing for the selection of cells in which the exogenous DNA has integrated into the host cell genome. The identification of the targeting event may also be facilitated by the use of one or more marker genes exhibiting the property of negative selection, such that the negatively selectable marker is linked to the exogenous DNA, but configured such that the negatively selectable marker flanks the targeting sequence, and such that a correct homologous recombination event with sequences in the host cell genome does not result in the stable integration of the negatively selectable marker. Markers useful for this purpose include the Herpes Simplex Virus thymidine kinase (TK) gene or the bacterial xanthine-guanine phosphoribosyl-transferase (gpt) gene.

[0102] The gene targeting or gene activation techniques which can be used in accordance with this aspect of the invention are more particularly described in U.S. Pat. No. 5,272,071 to Chappel; U.S. Pat. No. 5,578,461 to Sherwin et al.; International Application No. PCT/US92109627 (WO93/09222) by Selden et al.; and International Application No. PCT/US90/06436 (WO91/06667) by Skoultchi et al., each of which is incorporated by reference herein in its entirety.

[0103] 4.4 Polypeptides of the Invention

[0104] The isolated polypeptides of the invention include, but are not limited to, a polypeptide comprising: the amino acid sequences set forth as any one of SEQ ID NO: 1-108 or an amino acid sequence encoded by any one of the nucleotide sequences SEQ ID NOs: 1-108 or the corresponding full length or mature protein. Polypeptides of the invention also include polypeptides preferably with biological or immunological activity that are encoded by: (a) a polynucleotide having any one of the nucleotide sequences set forth in the SEQ ID NOs: 1-108 or (b) polynucleotides encoding any one of the amino acid sequences set forth as SEQ ID NO: 1-108 or (c) polynucleotides that hybridize to the complement of the polynucleotides of either (a) or (b) under stringent hybridization conditions. The invention also provides biologically active or immunologically active variants of any of the amino acid sequences set forth as SEQ ID NO: 1-108 or the corresponding full length or mature protein; and “substantial equivalents” thereof (e.g., with at least about 65%, at least about 70%, at least about 75%, at least about 80%, at least about 85%, at least about 90%, typically at least about 95%, more typically at least about 98%, or most typically at least about 99% amino acid identity) that retain biological activity. Polypeptides encoded by allelic variants may have a similar, increased, or decreased activity compared to polypeptides comprising SEQ ID NO: 1-108.

[0105] Fragments of the proteins of the present invention which are capable of exhibiting biological activity are also encompassed by the present invention. Fragments of the protein may be in linear form or they may be cyclized using known methods, for example, as described in H. U. Saragovi, et al., Bio/Technology 10, 773-778 (1992) and in R. S. McDowell, et al., J. Amer. Chem. Soc. 114, 9245-9253 (1992), both of which are incorporated herein by reference. Such fragments may be fused to carrier molecules such as immunoglobulins for many purposes, including increasing the valency of protein binding sites.

[0106] The present invention also provides both full-length and mature forms (for example, without a signal sequence or precursor sequence) of the disclosed proteins. The protein coding sequence is identified in the sequence listing by translation of the disclosed nucleotide sequences. The mature form of such protein may be obtained by expression of a full-length polynucleotide in a suitable mammalian cell or other host cell. The sequence of the mature form of the protein is also determinable from the amino acid sequence of the full-length form. Where proteins of the present invention are membrane bound, soluble forms of the proteins are also provided. In such forms, part or all of the regions causing the proteins to be membrane bound are deleted so that the proteins are fully secreted from the cell in which it is expressed.

[0107] Protein compositions of the present invention pay further comprise an acceptable carrier, such as a hydrophilic, e.g., pharmaceutically acceptable, carrier.

[0108] The present invention further provides isolated polypeptides encoded by the nucleic acid fragments of the present invention or by degenerate variants of the nucleic acid fragments of the present invention. By “degenerate variant” is intended nucleotide fragments which differ from a nucleic acid fragment of the present invention (e.g., an ORF) by nucleotide sequence but, due to the degeneracy of the genetic code, encode an identical polypeptide sequence. Preferred nucleic acid fragments of the present invention are the ORFs that encode proteins.

[0109] A variety of methodologies known in the art can be utilized to obtain any one of the isolated polypeptides or proteins of the present invention. At the simplest level, the amino acid sequence can be synthesized using commercially available peptide synthesizers. The synthetically-constructed protein sequences, by virtue of sharing primary, secondary or tertiary structural and/or conformational characteristics with proteins may possess biological properties in common therewith, including protein activity. This technique is particularly useful in producing small peptides and fragments of larger polypeptides. Fragments are useful, for example, in generating antibodies against the native polypeptide. Thus, they may be employed as biologically active or immunological substitutes for natural, purified proteins in screening of therapeutic compounds and in immunological processes for the development of antibodies.

[0110] The polypeptides and proteins of the present invention can alternatively be purified from cells which have been altered to express the desired polypeptide or protein. As used herein, a cell is said to be altered to express a desired polypeptide or protein when the cell, through genetic manipulation, is made to produce a polypeptide or protein which it normally does not produce or which the cell normally produces at a lower level. One skilled in the art can readily adapt procedures for introducing and expressing either recombinant or synthetic sequences into eukaryotic or prokaryotic cells in order to generate a cell which produces one of the polypeptides or proteins of the present invention.

[0111] The invention also relates to methods for producing a polypeptide comprising growing a culture of host cells of the invention in a suitable culture medium, and purifying the protein from the cells or the culture in which the cells are grown. For example, the methods of the invention include a process for producing a polypeptide in which a host cell containing a suitable expression vector that includes a polynucleotide of the invention is cultured under conditions that allow expression of the encoded polypeptide. The polypeptide can be recovered from the culture, conveniently from the culture medium, or from a lysate prepared from the host cells and further purified. Preferred embodiments include those in which the protein produced by such process is a full length or mature form of the protein.

[0112] In an alternative method, the polypeptide or protein is purified from bacterial cells which naturally produce the polypeptide or protein. One skilled in the art can readily follow known methods for isolating polypeptides and proteins in order to obtain one of the isolated polypeptides or proteins of the present invention. These include, but are not limited to, immunochromatography, HPLC, size-exclusion chromatography, ion-exchange chromatography, and immuno-affinity chromatography. See, e.g., Scopes, Protein Purification: Principles and Practice, Springer-Verlag (1994); Sambrook, et al., in Molecular Cloning: A Laboratory Manual; Ausubel et al., Current Protocols in Molecular Biology. Polypeptide fragments that retain biological/immunological activity include fragments comprising greater than about 100 amino acids, or greater than about 200 amino acids, and fragments that encode specific protein domains.

[0113] The purified polypeptides can be used in in vitro binding assays which are well known in the art to identify molecules which bind to the polypeptides. These molecules include but are not limited to, for e.g., small molecules, molecules from combinatorial libraries, antibodies or other proteins. The molecules identified in the binding assay are then tested for antagonist or agonist activity in in vivo tissue culture or animal models that are well known in the art. In brief, the molecules are titrated into a plurality of cell cultures or animals and then tested for either cell/animal death or prolonged survival of the animal/cells.

[0114] In addition, the peptides of the invention or molecules capable of binding to the peptides may be complexed with toxins, e.g., ricin or cholera, or with other compounds that are toxic to cells. The toxin-binding molecule complex is then targeted to a tumor or other cell by the specificity of the binding molecule for SEQ ID NO: 1-108.

[0115] The protein of the invention may also be expressed as a product of transgenic animals, e.g., as a component of the milk of transgenic cows, goats, pigs, or sheep which are characterized by somatic or germ cells containing a nucleotide sequence encoding the protein.

[0116] The proteins provided herein also include proteins characterized by amino acid sequences similar to those of purified proteins but into which modification are naturally provided or deliberately engineered. For example, modifications, in the peptide or DNA sequence, can be made by those skilled in the art using known techniques. Modifications of interest in the protein sequences may include the alteration, substitution, replacement, insertion or deletion of a selected amino acid residue in the coding sequence. For example, one or more of the cysteine residues may be deleted or replaced with another amino acid to alter the conformation of the molecule. Techniques for such alteration, substitution, replacement, insertion or deletion are well known to those skilled in the art (see, e.g., U.S. Pat. No. 4,518,584). Preferably, such alteration, substitution, replacement, insertion or deletion retains the desired activity of the protein. Regions of the protein that are important for the protein function can be determined by various methods known in the art including the alanine-scanning method which involved systematic substitution of single or strings of amino acids with alanine, followed by testing the resulting alanine-containing variant for biological activity. This type of analysis determines the importance of the substituted amino acid(s) in biological activity. Regions of the protein that are important for protein function may be determined by the eMATRIX program.

[0117] Other fragments and derivatives of the sequences of proteins which would be expected to retain protein activity in whole or in part and are useful for screening or other immunological methodologies may also be easily made by those skilled in the art given the disclosures herein. Such modifications are encompassed by the present invention.

[0118] The protein may also be produced by operably linking the isolated polynucleotide of the invention to suitable control sequences in one or more insect expression vectors, and employing an insect expression system. Materials and methods for baculovirus/insect cell expression systems are commercially available in kit form from, e.g., Invitrogen, San Diego, Calif., U.S.A. (the MaxBat™ kit), and such methods are well known in the art, as described in Summers and Smith, Texas Agricultural Experiment Station Bulletin No. 1555 (1987), incorporated herein by reference. As used herein, an insect cell capable of expressing a polynucleotide of the present invention is “transformed.”

[0119] The protein of the invention may be prepared by culturing transformed host cells under culture conditions suitable to express the recombinant protein. The resulting expressed protein may then be purified from such culture (i.e., from culture medium or cell extracts) using known purification processes, such as gel filtration and ion exchange chromatography. The purification of the protein may also include an affinity column containing agents which will bind to the protein; one or more column steps over such affinity resins as concanavalin A-agarose, heparin-toyopearl™ or Cibacrom blue 3GA Sepharose™; one or more steps involving hydrophobic interaction chromatography using such resins as phenyl ether, butyl ether, or propyl ether; or immunoaffinity chromatography.

[0120] Alternatively, the protein of the invention may also be expressed in a form which will facilitate purification. For example, it may be expressed as a fusion protein, such as those of maltose binding protein (MBP), glutathione-S-transferase (GST) or thioredoxin (TRX), or as a His tag. Kits for expression and purification of such fusion proteins are commercially available from New England BioLab (Beverly, Mass.), Pharmacia (Piscataway, N.J.) and Invitrogen, respectively. The protein can also be tagged with an epitope and subsequently purified by using a specific antibody directed to such epitope. One such epitope (“FLAG®”) is commercially available from Kodak (New Haven, Conn.).

[0121] Finally, one or more reverse-phase high performance liquid chromatography (RP-HPLC) steps employing hydrophobic RP-HPLC media, e.g., silica gel having pendant methyl or other aliphatic groups, can be employed to further purify the protein. Some or all of the foregoing purification steps, in various combinations, can also be employed to provide a substantially homogeneous isolated recombinant protein. The protein thus purified is substantially free of other mammalian proteins and is defined in accordance with the present invention as an “isolated protein.”

[0122] The polypeptides of the invention include analogs (variants). This embraces fragments, as well as peptides in which one or more amino acids has been deleted, inserted, or substituted. Also, analogs of the polypeptides of the invention embrace fusions of the polypeptides or modifications of the polypeptides of the invention, wherein the polypeptide or analog is fused to another moiety or moieties, e.g., targeting moiety or another therapeutic agent. Such analogs may exhibit improved properties such as activity and/or stability. Examples of moieties which may be fused to the polypeptide or an analog include, for example, targeting moieties which provide for the delivery of polypeptide to pancreatic cells, e.g., antibodies to pancreatic cells, antibodies to immune cells such as T-cells, monocytes, dendritic cells, granulocytes, etc., as well as receptor and ligands expressed on pancreatic or immune cells. Other moieties which may be fused to the polypeptide include therapeutic agents which are used for treatment, for example, immunosuppressive drugs such as cyclosporin, SK506, azathioprine, CD3 antibodies and steroids. Also, polypeptides may be fused to immune modulators, and other cytokines such as alpha or beta interferon.

[0123] 4.4.1 Determining Polypeptide and Polynucleotide Identity and Similarity

[0124] Preferred identity and/or similarity are designed to give the largest match between the sequences tested. Methods to determine identity and similarity are codified in computer programs including, but are not limited to, the GCG program package, including GAP (Devereux, J., et al., Nucleic Acids Research 12(1):387 (1984); Genetics Computer Group, University of Wisconsin, Madison, Wis.), BLASTP, BLASTN, BLASTX, FASTA (Altschul, S. F. et al., J. Molec. Biol. 215:403-410 (1990), PSI-BLAST (Altschul S. F. et al., Nucleic Acids Res. vol. 25, pp. 3389-3402, herein incorporated by reference), eMatrix software (Wu et al., J. Comp. Biol., vol. 6, pp. 219-235 (1999), herein incorporated by reference), eMotif software (Nevill-Manning et al, ISMB-97, vol 4, pp. 202-209, herein incorporated by reference) and the Kyte-Doolittle hydrophobocity prediction algorithm (J. Mol Biol, 157, pp. 105-31 (1982), incorporated herein by reference). The BLAST programs are publicly available from the National Center for Biotechnology Information (NCBI) and other sources (BLAST Manual, Altschul, S., et al. NCB NLM NIH Bethesda, Md. 20894; Altschul, S., et al., J. Mol. Biol. 215:403-410 (1990).

[0125] 4.5 Gene Therapy

[0126] Mutations in the polynucleotides of the invention gene may result in loss of normal function of the encoded protein. The invention thus provides gene therapy to restore normal activity of the polypeptides of the invention; or to treat disease states involving polypeptides of the invention. Delivery of a functional gene encoding polypeptides of the invention to appropriate cells is effected ex vivo, in situ, or in vivo by use of vectors, and more particularly viral vectors (e.g., adenovirus, adeno-associated virus, or a retrovirus), or ex vivo by use of physical DNA transfer methods (e.g., liposomes or chemical treatments). See, for example, Anderson, Nature, supplement to vol. 392, no. 6679, pp.25-20 (1998). For additional reviews of gene therapy technology see Friedmann, Science, 244: 1275-1281 (1989); Verma, Scientific American: 68-84 (1990); and Miller, Nature, 357: 455-460 (1992). Introduction of any one of the nucleotides of the present invention or a gene encoding the polypeptides of the present invention can also be accomplished with extrachromosomal substrates (transient expression) or artificial chromosomes (stable expression). Cells may also be cultured ex vivo in the presence of proteins of the present invention in order to proliferate or to produce a desired effect on or activity in such cells. Treated cells can then be introduced in vivo for therapeutic purposes. Alternatively, it is contemplated that in other human disease states, preventing the expression of or inhibiting the activity of polypeptides of the invention will be useful in treating the disease states. It is contemplated that antisense therapy or gene therapy could be applied to negatively regulate the expression of polypeptides of the invention.

[0127] Other methods inhibiting expression of a protein include the introduction of antisense molecules to the nucleic acids of the present invention, their complements, or their translated RNA sequences, by methods known in the art. Further, the polypeptides of the present invention can be inhibited by using targeted deletion methods, or the insertion of a negative regulatory element such as a silencer, which is tissue specific.

[0128] The present invention still further provides cells genetically engineered in vivo to express the polynucleotides of the invention, wherein such polynucleotides are in operative association with a regulatory sequence heterologous to the host cell which drives expression of the polynucleotides in the cell. These methods can be used to increase or decrease the expression of the polynucleotides of the present invention.

[0129] Knowledge of DNA sequences provided by the invention allows for modification of cells to permit, increase, or decrease, expression of endogenous polypeptide. Cells can be modified (e.g., by homologous recombination) to provide increased polypeptide expression by replacing, in whole or in part, the naturally occurring promoter with all or part of a heterologous promoter so that the cells express the protein at higher levels. The heterologous promoter is inserted in such a manner that it is operatively linked to the desired protein encoding sequences. See, for example, PCT International Publication No. WO 94/12650, PCT International Publication No. WO 92/20808, and PCT International Publication No. WO 91/09955. It is also contemplated that, in addition to heterologous promoter DNA, amplifiable marker DNA (e.g., ada, dhfr, and the multifunctional CAD gene which encodes carbamyl phosphate synthase, aspartate transcarbamylase, and dihydroorotase) and/or intron DNA may be inserted along with the heterologous promoter DNA. If linked to the desired protein coding sequence, amplification of the marker DNA by standard selection methods results in co-amplification of the desired protein coding sequences in the cells.

[0130] In another embodiment of the present invention, cells and tissues may be engineered to express an endogenous gene comprising the polynucleotides of the invention under the control of inducible regulatory elements, in which case the regulatory sequences of the endogenous gene may be replaced by homologous recombination. As described herein, gene targeting can be used to replace a gene's existing regulatory region with a regulatory sequence isolated from a different gene or a novel regulatory sequence synthesized by genetic engineering methods. Such regulatory sequences may be comprised of promoters, enhancers, scaffold-attachment regions, negative regulatory elements, transcriptional initiation sites, regulatory protein binding sites or combinations of said sequences. Alternatively, sequences which affect the structure or stability of the RNA or protein produced may be replaced, removed, added, or otherwise modified by targeting. These sequences include polyadenylation signals, mRNA stability elements, splice sites, leader sequences for enhancing or modifying transport or secretion properties of the protein, or other sequences which alter or improve the function or stability of protein or RNA molecules.

[0131] The targeting event may be a simple insertion of the regulatory sequence, placing the gene under the control of the new regulatory sequence, e.g., inserting a new promoter or enhancer or both upstream of a gene. Alternatively, the targeting event may be a simple deletion of a regulatory element, such as the deletion of a tissue-specific negative regulatory element. Alternatively, the targeting event may replace an existing element; for example, a tissue-specific enhancer can be replaced by an enhancer that has broader or different cell-type specificity than the naturally occurring elements. Here, the naturally occurring sequences are deleted and new sequences are added. In all cases, the identification of the targeting event may be facilitated by the use of one or more selectable marker genes that are contiguous with the targeting DNA, allowing for the selection of cells in which the exogenous DNA has integrated into the cell genome. The identification of the targeting event may also be facilitated by the use of one or more marker genes exhibiting the property of negative selection, such that the negatively selectable marker is linked to the exogenous DNA, but configured such that the negatively selectable marker flanks the targeting sequence, and such that a correct homologous recombination event with sequences in the host cell genome does not result in the stable integration of the negatively selectable marker. Markers useful for this purpose include the Herpes Simplex Virus thymidine kinase (TK) gene or the bacterial xanthine-guanine phosphoribosyl-transferase (gpt) gene.

[0132] The gene targeting or gene activation techniques which can be used in accordance with this aspect of the invention are more particularly described in U.S. Pat. No. 5,272,071 to Chappel; U.S. Pat. No. 5,578,461 to Sherwin et al.; International Application No. PCT/US92/09627 (WO93/09222) by Selden et al.; and International Application No. PCT/US90/06436 (WO91/06667) by Skoultchi et al., each of which is incorporated by reference herein in its entirety.

[0133] 4.6 Transgenic Animals

[0134] In preferred methods to determine biological functions of the polypeptides of the invention in vivo, one or more genes provided by the invention are either over expressed or inactivated in the germ line of animals using homologous recombination [Capecchi, Science 244:1288-1292 (1989)]. Animals in which the gene is over expressed, under the regulatory control of exogenous or endogenous promoter elements, are known as transgenic animals. Animals in which an endogenous gene has been inactivated by homologous recombination are referred to as “knockout” animals. Knockout animals, preferably non-human mammals, can be prepared as described in U.S. Pat. No. 5,557,032, incorporated herein by reference. Transgenic animals are useful to determine the roles polypeptides of the invention play in biological processes, and preferably in disease states. Transgenic animals are useful as model systems to identify compounds that modulate lipid metabolism. Transgenic animals, preferably non-human mammals, are produced using methods as described in U.S. Pat. No. 5,489,743 and PCT Publication No. WO94/28122, incorporated herein by reference.

[0135] Transgenic animals can be prepared wherein all or part of a promoter of the polynucleotides of the invention is either activated or inactivated to alter the level of expression of the polypeptides of the invention. Inactivation can be carried out using homologous recombination methods described above. Activation can be achieved by supplementing or even replacing the homologous promoter to provide for increased protein expression. The homologous promoter can be supplemented by insertion of one or more heterologous enhancer elements known to confer promoter activation in a particular tissue.

[0136] The polynucleotides of the present invention also make possible the development, through, e.g., homologous recombination or knock out strategies, of animals that fail to express polypeptides of the invention or that express a variant polypeptide. Such animals are useful as models for studying the in vivo activities of polypeptide as well as for studying modulators of the polypeptides of the invention.

[0137] In preferred methods to determine biological functions of the polypeptides of the invention in vivo, one or more genes provided by the invention are either over expressed or inactivated in the germ line of animals using homologous recombination [Capecchi, Science 244:1288-1292 (1989)]. Animals in which the gene is over expressed, under the regulatory control of exogenous or endogenous promoter elements, are known as transgenic animals. Animals in which an endogenous gene has been inactivated by homologous recombination are referred to as “knockout” animals. Knockout animals, preferably non-human mammals, can be prepared as described in U.S. Pat. No. 5,557,032, incorporated herein by reference. Transgenic animals are useful to determine the roles polypeptides of the invention play in biological processes, and preferably in disease states. Transgenic animals are useful as model systems to identify compounds that modulate lipid metabolism. Transgenic animals, preferably non-human mammals, are produced using methods as described in U.S. Pat. No. 5,489,743 and PCT Publication No. WO94/28122, incorporated herein by reference.

[0138] Transgenic animals can be prepared wherein all or part of the polynucleotides of the invention promoter is either activated or inactivated to alter the level of expression of the polypeptides of the invention. Inactivation can be carried out using homologous recombination methods described above. Activation can be achieved by supplementing or even replacing the homologous promoter to provide for increased protein expression. The homologous promoter can be supplemented by insertion of one or more heterologous enhancer elements known to confer promoter activation in a particular tissue.

[0139] 4.7 Uses and Biological Activity

[0140] The polynucleotides and proteins of the present invention are expected to exhibit one or more of the uses or biological activities (including those associated with assays cited herein) identified herein. Uses or activities described for proteins of the present invention may be provided by administration or use of such proteins or of polynucleotides encoding such proteins (such as, for example, in gene therapies or vectors suitable for introduction of DNA). The mechanism underlying the particular condition or pathology will dictate whether the polypeptides of the invention, the polynucleotides of the invention or modulators (activators or inhibitors) thereof would be beneficial to the subject in need of treatment. Thus, “therapeutic compositions of the invention” include compositions comprising isolated polynucleotides (including recombinant DNA molecules, cloned genes and degenerate variants thereof) or polypeptides of the invention (including full length protein, mature protein and truncations or domains thereof), or compounds and other substances that modulate the overall activity of the target gene products, either at the level of target gene/protein expression or target protein activity. Such modulators include polypeptides, analogs, (variants), including fragments and fusion proteins, antibodies and other binding proteins; chemical compounds that directly or indirectly activate or inhibit the polypeptides of the invention (identified, e.g., via drug screening assays as described herein); antisense polynucleotides and polynucleotides suitable for triple helix formation; and in particular antibodies or other binding partners that specifically recognize one or more epitopes of the polypeptides of the invention.

[0141] The polypeptides of the present invention may likewise be involved in cellular activation or in one of the other physiological pathways described herein.

[0142] 4.7.1 Research Uses and Utilities

[0143] The polynucleotides provided by the present invention can be used by the research community for various purposes. The polynucleotides can be used to express recombinant protein for analysis, characterization or therapeutic use; as markers for tissues in which the corresponding protein is preferentially expressed (either constitutively or at a particular stage of tissue differentiation or development or in disease states); as molecular weight markers on gels; as chromosome markers or tags (when labeled) to identify chromosomes or to map related gene positions; to compare with endogenous DNA sequences in patients to identify potential genetic disorders; as probes to hybridize and thus discover novel, related DNA sequences; as a source of information to derive PCR primers for genetic fingerprinting; as a probe to “subtract-out” known sequences in the process of discovering other novel polynucleotides; for selecting and making oligomers for attachment to a “gene chip” or other support, including for examination of expression patterns; to raise anti-protein antibodies using DNA immunization techniques; and as an antigen to raise anti-DNA antibodies or elicit another immune response. Where the polynucleotide encodes a protein which binds or potentially binds to another protein (such as, for example, in a receptor-ligand interaction), the polynucleotide can also be used in interaction trap assays (such as, for example, that described in Gyuris et al., Cell 75:791-803 (1993)) to identify polynucleotides encoding the other protein with which binding occurs or to identify inhibitors of the binding interaction.

[0144] The polypeptides provided by the present invention can similarly be used in assays to determine biological activity, including in a panel of multiple proteins for high-throughput screening; to raise antibodies or to elicit another immune response; as a reagent (including the labeled reagent) in assays designed to quantitatively determine levels of the protein (or its receptor) in biological fluids; as markers for tissues in which the corresponding polypeptide is preferentially expressed (either constitutively or at a particular stage of tissue differentiation or development or in a disease state); and, of course, to isolate correlative receptors or ligands. Proteins involved in these binding interactions can also be used to screen for peptide or small molecule inhibitors or agonists of the binding interaction.

[0145] Any or all of these research utilities are capable of being developed into reagent grade or kit format for commercialization as research products.

[0146] Methods for performing the uses listed above are well known to those skilled in the art. References disclosing such methods include without limitation “Molecular Cloning: A Laboratory Manual”, 2d ed., Cold Spring,Harbor Laboratory Press, Sambrook, J., E. F. Fritsch and T. Maniatis eds., 1989, and “Methods in Enzymology: Guide to Molecular Cloning Techniques”, Academic Press, Berger, S. L. and A. R. Kimmel eds., 1987.

[0147] 4.7.2 Nutritional Uses

[0148] Polynucleotides and polypeptides of the present invention can also be used as nutritional sources or supplements. Such uses include without limitation use as a protein or amino acid supplement, use as a carbon source, use as a nitrogen source and use as a source of carbohydrate. In such cases the polypeptide or polynucleotide of the invention can be added to the feed of a particular organism or can be administered as a separate solid or liquid preparation, such as in the form of powder, pills, solutions, suspensions or capsules. In the case of microorganisms, the polypeptide or polynucleotide of the invention can be added to the medium in or on which the microorganism is cultured.

[0149] 4.7.3 Cytokine and Cell Proliferation/Differentiation Activity

[0150] A polypeptide of the present invention may exhibit activity relating to cytokine, cell proliferation (either inducing or inhibiting) or cell differentiation (either inducing or inhibiting) activity or may induce production of other cytokines in certain cell populations. A polynucleotide of the invention can encode a polypeptide exhibiting such attributes. Many protein factors discovered to date, including all known cytokines, have exhibited activity in one or more factor-dependent cell proliferation assays, and hence the assays serve as a convenient confirmation of cytokine activity. The activity of therapeutic compositions of the present invention is evidenced by any one of a number of routine factor dependent cell proliferation assays for cell lines including, without limitation, 32D, DA2, DA1G, T10, B9, B9/11, BaF3, MC9/G, M+(preB M+), 2E8, RB5, DA1, 123, T1165, HT2, CTLL2, TF-1, Mo7e, CMK, HUVEC, and Caco. Therapeutic compositions of the invention can be used in the following:

[0151] Assays for T-cell or thymocyte proliferation include without limitation those described in: Current Protocols in Immunology, Ed by J. E. Coligan, A. M. Kruisbeek, D. H. Margulies, E. M. Shevach, W. Strober, Pub. Greene Publishing Associates and Wiley-Interscience (Chapter 3, In Vitro assays for Mouse Lymphocyte Function 3.1-3.19; Chapter 7, Immunologic studies in Humans); Takai et al., J. Immunol. 137:3494-3500, 1986; Bertagnolli et al., J. Immunol. 145:1706-1712, 1990; Bertagnolli et al., Cellular Immunology 133:327-341, 1991; Bertagnolli, et al., I. Immunol. 149:3778-3783, 1992; Bowman et al., I. Immunol. 152:1756-1761, 1994.

[0152] Assays for cytokine production and/or proliferation of spleen cells, lymph node cells or thymocytes include, without limitation, those described in: Polyclonal T cell stimulation, Kruisbeek, A. M. and Shevach, E. M. In Current Protocols in Immunology. J. E. e.a. Coligan eds. Vol 1 pp. 3.12.1-3.12.14, John Wiley and Sons, Toronto. 1994; and Measurement of mouse and human interleukin-γ, Schreiber, R. D. In Current Protocols in Immunology. J. E. e.a. Coligan eds. Vol 1 pp. 6.8.1-6.8.8, John Wiley and Sons, Toronto. 1994.

[0153] Assays for proliferation and differentiation of hematopoietic and lymphopoietic cells include, without limitation, those described in: Measurement of Human and Murine Interleukin 2 and Interleukin 4, Bottomly, K., Davis, L. S. and Lipsky, P. E. In Current Protocols in Immunology. J. E. e.a. Coligan eds. Vol 1 pp. 6.3.1-6.3.12, John Wiley and Sons, Toronto. 1991; deVries et al., J. Exp. Med. 173:1205-1211, 1991; Moreau et al., Nature 336:690-692, 1988; Greenberger et al., Proc. Natl. Acad. Sci. U.S.A. 80:2931-2938, 1983; Measurement of mouse and human interleukin 6—Nordan, R. In Current Protocols in Immunology. J. E. Coligan eds. Vol 1 pp. 6.6.1-6.6.5, John Wiley and Sons, Toronto. 1991; Smith et al., Proc. Natl. Aced. Sci. U.S.A. 83:1857-1861, 1986; Measurement of human Interleukin 11—Bennett, F., Giannotti, J., Clark, S.C. and Turner, K. J. In Current Protocols in Immunology. J. E. Coligan eds. Vol 1 pp. 6.15.1 John Wiley and Sons, Toronto. 1991; Measurement of mouse and human Interleukin 9—Ciarletta, A., Giannotti, J., Clark, S.C. and Turner, K. J. In Current Protocols in Immunology. J. E. Coligan eds. Vol 1 pp. 6.13.1, John Wiley and Sons, Toronto. 1991.

[0154] Assays for T-cell clone responses to antigens (which will identify, among others, proteins that affect APC-T cell interactions as well as direct T-cell effects by measuring proliferation and cytokine production) include, without limitation, those described in: Current Protocols in Immunology, Ed by J. E. Coligan, A. M. Kruisbeek, D. H. Margulies, E. M. Shevach, W Strober, Pub. Greene Publishing Associates and Wiley-Interscience (Chapter 3, In Vitro assays for Mouse Lymphocyte Function; Chapter 6, Cytokines and their cellular receptors; Chapter 7, Immunologic studies in Humans); Weinberger et al., Proc. Natl. Acad. Sci. USA 77:6091-6095, 1980; Weinberger et al., Eur. J. Immun. 11:405-411, 1981; Takai et al., J. Immunol. 137:3494-3500, 1986; Takai et al., J. Immunol. 140:508-512, 1988.

[0155] 4.7.4 Stem Cell Growth Factor Activity

[0156] A polypeptide of the present invention may exhibit stem cell growth factor activity and be involved in the proliferation, differentiation and survival of pluripotent and totipotent stem cells including primordial germ cells, embryonic stem cells, hematopoietic stem cells and/or germ line stem cells. Administration of the polypeptide of the invention to stem cells in vivo or ex vivo is expected to maintain and expand cell populations in a totipotential or pluripotential state which would be useful for re-engineering damaged or diseased tissues, transplantation, manufacture of biopharmaceuticals and the development of bio-sensors. The ability to produce large quantities of human cells has important working applications for the production of human proteins which currently must be obtained from non-human sources or donors, implantation of cells to treat diseases such as Parkinson's, Alzheimer's and other neurodegenerative diseases; tissues for grafting such as bone marrow, skin, cartilage, tendons, bone, muscle (including cardiac muscle), blood vessels, cornea, neural cells, gastrointestinal cells and others; and organs for transplantation such as kidney, liver, pancreas (including islet cells), heart and lung.

[0157] It is contemplated that multiple different exogenous growth factors and/or cytokines may be administered in combination with the polypeptide of the invention to achieve the desired effect, including any of the growth factors listed herein, other stem cell maintenance factors, and specifically including stem cell factor (SCF), leukemia inhibitory factor (LIF), Flt-3 ligand (Flt-3L), any of the interleukins, recombinant soluble IL-6 receptor fused to IL-6, macrophage inflammatory protein 1-alpha (MIP-1-alpha), G-CSF, GM-CSF, thrombopoietin (TPO), platelet factor 4 (PF-4), platelet-derived growth factor (PDGF), neural growth factors and basic fibroblast growth factor (bFGF).

[0158] Since totipotent stem cells can give rise to virtually any mature cell type, expansion of these cells in culture will facilitate the production of large quantities of mature cells. Techniques for culturing stem cells are known in the art and administration of polypeptides of the invention, optionally with other growth factors and/or cytokines, is expected to enhance the survival and proliferation of the stem cell populations. This can be accomplished by direct administration of the polypeptide of the invention to the culture medium. Alternatively, stroma cells transfected with a polynucleotide that encodes for the polypeptide of the invention can be used as a feeder layer for the stem cell populations in culture pr in vivo. Stromal support cells for feeder layers may include embryonic bone marrow fibroblasts, bone marrow stromal cells, fetal liver cells, or cultured embryonic fibroblasts (see U.S. Pat. No. 5,690,926).

[0159] Stem cells themselves can be transfected with a polynucleotide of the invention to induce autocrine expression of the polypeptide of the invention. This will allow for generation of undifferentiated totipotential/pluripotential stem cell lines that are useful as is or that can then be differentiated into the desired mature cell types. These stable cell lines can also serve as a source of undifferentiated totipotential/pluripotential mRNA to create cDNA libraries and templates for polymerase chain reaction experiments. These studies would allow for the isolation and identification of differentially expressed genes in stem cell populations that regulate stem cell proliferation and/or maintenance.

[0160] Expansion and maintenance of totipotent stem cell populations will be useful in the treatment of many pathological conditions. For example, polypeptides of the present invention may be used to manipulate stem cells in culture to give rise to neuroepithelial cells that can be used to augment or replace cells damaged by illness, autoimmune disease, accidental damage or genetic disorders. The polypeptide of the invention may be useful for inducing the proliferation of neural cells and for the regeneration of nerve and brain tissue, i.e. for the treatment of central and peripheral nervous system diseases and neuropathies, as well as mechanical and traumatic disorders which involve degeneration, death or trauma to neural cells or nerve tissue. In addition, the expanded stem cell populations can also be genetically altered for gene therapy purposes and to decrease host rejection of replacement tissues after grafting or implantation.

[0161] Expression of the polypeptide of the invention and its effect on stem cells can also be manipulated to achieve controlled differentiation of the stem cells into more differentiated cell types. A broadly applicable method of obtaining pure populations of a specific differentiated cell type from undifferentiated stem cell populations involves the use of a cell-type specific promoter driving a selectable marker. The selectable marker allows only cells of the desired type to survive. For example, stem cells can be induced to differentiate into cardiomyocytes (Wobus et al., Differentiation, 48: 173-182, (1991); Klug et al., J. Clin. Invest., 98(1): 216-224, (1998)) or skeletal muscle cells (Browder, L. W. In: Principles of Tissue Engineering eds. Lanza et al., Academic Press (1997)). Alternatively, directed differentiation of stem cells can be accomplished by culturing the stem cells in the presence of a differentiation factor such as retinoic acid and an antagonist of the polypeptide of the invention which would inhibit the effects of endogenous stem cell factor activity and allow differentiation to proceed.

[0162] In vitro cultures of stem cells can be used to determine if the polypeptide of the invention exhibits stem cell growth factor activity. Stem cells are isolated from any one of various cell sources (including hematopoietic stem cells and embryonic stem cells) and cultured on a feeder layer, as described by Thompson et al. Proc. Natl. Acad. Sci, U.S.A., 92: 7844-7848 (1995), in the presence of the polypeptide of the invention alone or in combination with other growth factors or cytokines. The ability of the polypeptide of the invention to induce stem cells proliferation is determined by colony formation on semi-solid support e.g. as described by Bernstein et al., Blood, 77: 2316-2321 (1991).

[0163] 4.7.5 Hematopoiesis Regulating Activity

[0164] A polypeptide of the present invention may be involved in regulation of hematopoiesis and, consequently, in the treatment of myeloid or lymphoid cell disorders. Even marginal biological activity in support of colony forming cells or of factor-dependent cell lines indicates involvement in regulating hematopoiesis, e.g. in supporting the growth and proliferation of erythroid progenitor cells alone or in combination with other cytokines, thereby indicating utility, for example, in treating various anemias or for use in conjunction with irradiation/chemotherapy to stimulate the production of erythroid precursors and/or erythroid cells; in supporting the growth and proliferation of myeloid cells such as granulocytes and monocytes/macrophages (i.e., traditional CSF activity) useful, for example, in conjunction with chemotherapy to prevent or treat consequent myelo-suppression; in supporting the growth and proliferation of megakaryocytes and consequently of platelets thereby allowing prevention or treatment of various platelet disorders such as thrombocytopenia, and generally for use in place of or complimentary to platelet transfusions; and/or in supporting the growth and proliferation of hematopoietic stem cells which are capable of maturing to any and all of the above-mentioned hematopoietic cells and therefore find therapeutic utility in various stem cell disorders (such as those usually treated with transplantation, including, without limitation, aplastic anemia and paroxysmal nocturnal hemoglobinuria), as well as in repopulating the stem cell compartment post irradiation/chemotherapy, either in-vivo or ex-vivo (i.e., in conjunction with bone marrow transplantation or with peripheral progenitor cell transplantation (homologous or heterologous)) as normal cells or genetically manipulated for gene therapy.

[0165] Therapeutic compositions of the invention can be used in the following:

[0166] Suitable assays for proliferation and differentiation of various hematopoietic lines are cited above.

[0167] Assays for embryonic stem cell differentiation (which will identify, among others, proteins that influence embryonic differentiation hematopoiesis) include, without limitation, those described in: Johansson et al. Cellular Biology 15:141-151, 1995; Keller et al., Molecular and Cellular Biology 13:473-486, 1993; McClanahan et al., Blood 81:2903-2915, 1993.

[0168] Assays for stem cell survival and differentiation (which will identify, among others, proteins that regulate lympho-hematopoiesis) include, without limitation, those described in: Methylcellulose colony forming assays, Freshney, M. G. In Culture of Hematopoietic Cells. R. I. Freshney, et al. eds. Vol pp. 265-268, Wiley-Liss, Inc., New York, N.Y. 1994; Hirayama et al., Proc. Natl. Acad. Sci. USA 89:5907-5911, 1992; Primitive hematopoietic colony forming cells with high proliferative potential, McNiece, I. K. and Briddell, R. A. In Culture of Hematopoietic Cells. R. I. Freshney, et al. eds. Vol pp. 23-39, Wiley-Liss, Inc., New York, N.Y. 1994; Neben et al., Experimental Hematology 22:353-359, 1994; Cobblestone area forming cell assay, Ploemacher, R. E. In Culture of Hematopoietic Cells. R. I. Freshney, et al. eds. Vol pp. 1-21, Wiley-Liss, Inc., New York, N.Y. 1994; Long term bone marrow cultures in the presence of stromal cells, Spooncer, E., Dexter, M. and Allen, T. In Culture of Hematopoietic Cells. R. I. Freshney, et al. eds. Vol pp. 163-179, Wiley-Liss, Inc., New York, N.Y. 1994; Long term culture initiating cell assay, Sutherland, H. J. In Culture of Hematopoietic Cells. R. I. Freshney, et al. eds. Vol pp. 139-162, Wiley-Liss, Inc., New York, N.Y. 1994.

[0169] 4.7.6 Tissue Growth Activity

[0170] A polypeptide of the present invention also may be involved in bone, cartilage, tendon, ligament and/or nerve tissue growth or regeneration, as well as in wound healing and tissue repair and replacement, and in healing of burns, incisions and ulcers.

[0171] A polypeptide of the present invention which induces cartilage and/or bone growth in circumstances where bone is not normally formed, has application in the healing of bone fractures and cartilage damage or defects in humans and other animals. Compositions of a polypeptide, antibody, binding partner, or other modulator of the invention may have prophylactic use in closed as well as open fracture reduction and also in the improved fixation of artificial joints. De novo bone formation induced by an osteogenic agent contributes to the repair of congenital, trauma induced, or oncologic resection induced craniofacial defects, and also is useful in cosmetic plastic surgery.

[0172] A polypeptide of this invention may also be involved in attracting bone-forming cells, stimulating growth of bone-forming cells, or inducing differentiation of progenitors of bone-forming cells. Treatment of osteoporosis, osteoarthritis, bone degenerative disorders, or periodontal disease, such as through stimulation of bone and/or cartilage repair or by blocking inflammation or processes of tissue destruction (collagenase activity, osteoclast activity, etc.) mediated by inflammatory processes may also be possible using the composition of the invention.

[0173] Another category of tissue regeneration activity that may involve the polypeptide of the present invention is tendon/ligament formation. Induction of tendon/ligament-like tissue or other tissue formation in circumstances where such tissue is not normally formed, has application in the healing of tendon or ligament tears, deformities and other tendon or ligament defects in humans and other animals. Such a preparation employing a tendon/ligament-like tissue inducing protein may have prophylactic use in preventing damage to tendon or ligament tissue, as well as use in the improved fixation of tendon or ligament to bone or other tissues, and in repairing defects to tendon or ligament tissue. De novo tendon/ligament-like tissue formation induced by a composition of the present invention contributes to the repair of congenital, trauma induced, or other tendon or ligament defects of other origin, and is also useful in cosmetic plastic surgery for attachment or repair of tendons or ligaments. The compositions of the present invention may provide environment to attract tendon- or ligament-forming cells, stimulate growth of tendon- or ligament-forming cells, induce differentiation of progenitors of tendon- or ligament-forming cells, or induce growth of tendon/ligament cells or progenitors ex vivo for return in vivo to effect tissue repair. The compositions of the invention may also be useful in the treatment of tendinitis, carpal tunnel syndrome and other tendon or ligament defects. The compositions may also include an appropriate matrix and/or sequestering agent as a carrier as is well known in the art.

[0174] The compositions of the present invention may also be useful for proliferation of neural cells and for regeneration of nerve and brain tissue, i.e. for the treatment of central and peripheral nervous system diseases and neuropathies, as well as mechanical and traumatic disorders, which involve degeneration, death or trauma to neural cells or nerve tissue. More specifically, a composition may be used in the treatment of diseases of the peripheral nervous system, such as peripheral nerve injuries, peripheral neuropathy and localized neuropathies, and central nervous system diseases, such as Alzheimer's, Parkinson's disease, Huntington's disease, amyotrophic lateral sclerosis, and Shy-Drager syndrome. Further conditions which may be treated in accordance with the present invention include mechanical and traumatic disorders, such as spinal cord disorders, head trauma and cerebrovascular diseases such as stroke. Peripheral neuropathies resulting from chemotherapy or other medical therapies may also be treatable using a composition of the invention.

[0175] Compositions of the invention may also be useful to promote better or faster closure of non-healing wounds, including without limitation pressure ulcers, ulcers associated with vascular insufficiency, surgical and traumatic wounds, and the like.

[0176] Compositions of the present invention may also be involved in the generation or regeneration of other tissues, such as organs (including, for example, pancreas, liver, intestine, kidney, skin, endothelium), muscle (smooth, skeletal or cardiac) and vascular (including vascular endothelium) tissue, or for promoting the growth of cells comprising such tissues. Part of the desired effects may be by inhibition or modulation of fibrotic scarring may allow normal tissue to regenerate. A polypeptide of the present invention may also exhibit angiogenic activity.

[0177] A composition of the present invention may also be useful for gut protection or regeneration and treatment of lung or liver fibrosis, reperfusion injury in various tissues, and conditions resulting from systemic cytokine damage.

[0178] A composition of the present invention may also be useful for promoting or inhibiting differentiation of tissues described above from precursor tissues or cells; or for inhibiting the growth of tissues described above.

[0179] Therapeutic compositions of the invention can be used in the following:

[0180] Assays for tissue generation activity include, without limitation, those described in: International Patent Publication No. WO95/16035 (bone, cartilage, tendon); International Patent Publication No. WO95/05846 (nerve, neuronal); International Patent Publication No. WO91/07491 (skin, endothelium).

[0181] Assays for wound healing activity include, without limitation, those described in: Winter, Epidermal Wound Healing, pps. 71-112 (Maibach, H. I. and Rovee, D. T., eds.), Year Book Medical Publishers, Inc., Chicago, as modified by Eaglstein and Mertz, J. Invest. Dermatol 71:382-84 (1978).

[0182] 4.7.7 Immune Stimulating or Suppressing Activity

[0183] A polypeptide of the present invention may also exhibit immune stimulating or immune suppressing activity, including without limitation the activities for which assays are described herein. A polynucleotide of the invention can encode a polypeptide exhibiting such activities. A protein may be useful in the treatment of various immune deficiencies and disorders (including severe combined immunodeficiency (SCID)), e.g., in regulating (up or down) growth and proliferation of T and/or B lymphocytes, as well as effecting the cytolytic activity of NK cells and other cell populations. These immune deficiencies may be genetic or be caused by viral (e.g., HIV) as well as bacterial or fungal infections, or may result from autoimmune disorders. More specifically, infectious diseases causes by viral, bacterial, fungal or other infection may be treatable using a protein of the present invention, including infections by HIV, hepatitis viruses, herpes viruses, mycobacteria, Leishmania spp., malaria spp. and various fungal infections such as candidiasis. Of course, in this regard, proteins of the present invention may also be useful where a boost to the immune system generally may be desirable, i.e., in the treatment of cancer.

[0184] Autoimmune disorders which may be treated using a protein of the present invention include, for example, connective tissue disease, multiple sclerosis, systemic lupus erythematosus, rheumatoid arthritis, autoimmune pulmonary inflammation, Guillain-Barre syndrome, autoimmune thyroiditis, insulin dependent diabetes mellitis, myasthenia gravis, graft-versus-host disease and autoimmune inflammatory eye disease. Such a protein (or antagonists thereof, including antibodies) of the present invention may also to be useful in the treatment of allergic reactions and conditions (e.g., anaphylaxis, serum sickness, drug reactions, food allergies, insect venom allergies, mastocytosis, allergic rhinitis, hypersensitivity pneumonitis, urticaria, angioedema, eczema, atopic dermatitis, allergic contact dermatitis, erythema multiforme, Stevens-Johnson syndrome, allergic conjunctivitis, atopic keratoconjunctivitis, venereal keratoconjunctivitis, giant papillary conjunctivitis and contact allergies), such as asthma (particularly allergic asthma) or other respiratory problems. Other conditions, in which immune suppression is desired (including, for example, organ transplantation), may also be treatable using a protein (or antagonists thereof) of the present invention. The therapeutic effects of the polypeptides or antagonists thereof on allergic reactions can be evaluated by in vivo animals models such as the cumulative contact enhancement test (Lastbom et al., Toxicology 125: 59-66, 1998), skin prick test (Hoffmann et al., Allergy 54: 446-54, 1999), guinea pig skin sensitization test (Vohr et al., Arch. Toxocol. 73: 501-9), and murine local lymph node assay (Kimber et al., J. Toxicol. Environ. Health 53: 563-79).

[0185] Using the proteins of the invention it may also be possible to modulate immune responses, in a number of ways. Down regulation may be in the form of inhibiting or blocking an immune response already in progress or may involve preventing the induction of an immune response. The functions of activated T cells may be inhibited by suppressing T cell responses or by inducing specific tolerance in T cells, or both. Immunosuppression of T cell responses is generally an active, non-antigen-specific, process which requires continuous exposure of the T cells to the suppressive agent. Tolerance, which involves inducing non-responsiveness or anergy in T cells, is distinguishable from immunosuppression in that it is generally antigen-specific and persists after exposure to the tolerizing agent has ceased. Operationally, tolerance can be demonstrated by the lack of a T cell response upon reexposure to specific antigen in the absence of the tolerizing agent.

[0186] Down regulating or preventing one or more antigen functions (including without limitation B lymphocyte antigen functions (such as, for example, B7)), e.g., preventing high level lymphokine synthesis by activated T cells, will be useful in situations of tissue, skin and organ transplantation and in graft-versus-host disease (GVHD). For example, blockage of T cell function should result in reduced tissue destruction in tissue transplantation. Typically, in tissue transplants, rejection of the transplant is initiated through its recognition as foreign by T cells, followed by an immune reaction that destroys the transplant. The administration of a therapeutic composition of the invention may prevent cytokine synthesis by immune cells, such as T cells, and thus acts as an immunosuppressant. Moreover, a lack of costirnulation may also be sufficient to anergize the T cells, thereby inducing tolerance in a subject. Induction of long-term tolerance by B lymphocyte antigen-blocking reagents may avoid the necessity of repeated administration of these blocking reagents. To achieve sufficient immunosuppression or tolerance in a subject, it may also be necessary to block the function of a combination of B lymphocyte antigens.

[0187] The efficacy of particular therapeutic compositions in preventing organ transplant rejection or GVHD can be assessed using animal models that are predictive of efficacy in humans. Examples of appropriate systems which can be used include allogeneic cardiac grafts in rats and xenogeneic pancreatic islet cell grafts in mice, both of which have been used to examine the immunosuppressive effects of CTLA4Ig fusion proteins in vivo as described in Lenschow et al., Science 257:789-792 (1992) and Turka et al., Proc. Natl. Acad. Sci USA, 89:11102-11105 (1992). In addition, murine models of GVHD (see Paul ed., Fundamental Immunology, Raven Press, New York, 1989, pp. 846-847) can be used to determine the effect of therapeutic compositions of the invention on the development of that disease.

[0188] Blocking antigen function may also be therapeutically useful for treating autoimmune diseases. Many autoimmune disorders are the result of inappropriate activation of T cells that are reactive against self tissue and which promote the production of cytokines and autoantibodies involved in the pathology of the diseases. Preventing the activation of autoreactive T cells may reduce or eliminate disease symptoms. Administration of reagents which block stimulation of T cells can be used to inhibit T cell activation and prevent production of autoantibodies or T cell-derived cytokines which may be involved in the disease process. Additionally, blocking reagents may induce antigen-specific tolerance of autoreactive T cells which could lead to long-term relief from the disease. The efficacy of blocking reagents in preventing or alleviating autoimmune disorders can be determined using a number of well-characterized animal models of human autoimmune diseases. Examples include murine experimental autoimmune encephalitis, systemic lupus erythmatosis in MRL/lpr/lpr mice or NZB hybrid mice, murine autoimmune collagen arthritis, diabetes mellitus in NOD mice and BB rats, and murine experimental myasthenia gravis (see Paul ed., Fundamental Immunology, Raven Press, New York, 1989, pp. 840-856).

[0189] Upregulation of an antigen function (e.g., a B lymphocyte antigen function), as a means of up regulating immune responses, may also be useful in therapy. Upregulation of immune responses may be in the form of enhancing an existing immune response or eliciting an initial immune response. For example, enhancing an immune response may be useful in cases of viral infection, including systemic viral diseases such as influenza, the common cold, and encephalitis.

[0190] Alternatively, anti-viral immune responses may be enhanced in an infected patient by removing T cells from the patient, costimulating the T cells in vitro with viral antigen-pulsed APCs either expressing a peptide of the present invention or together with a stimulatory form of a soluble peptide of the present invention and reintroducing the in vitro activated T cells into the patient. Another method of enhancing anti-viral immune responses would be to isolate infected cells from a patient, transfect them with a nucleic acid encoding a protein of the present invention as described herein such that the cells express all or a portion of the protein on their surface, and reintroduce the transfected cells into the patient. The infected cells would now be capable of delivering a costimulatory signal to, and thereby activate, T cells in vivo.

[0191] A polypeptide of the present invention may provide the necessary stimulation signal to T cells to induce a T cell mediated immune response against the transfected tumor cells. In addition, tumor cells which lack MHC class I or MHC class II molecules, or which fail to reexpress sufficient mounts of MHC class I or MHC class II molecules, can be transfected with nucleic acid encoding all or a portion of (e.g., a cytoplasmic-domain truncated portion) of an MHC class I alpha chain protein and 2 microglobulin protein or an MHC class II alpha chain protein and an MHC class II beta chain protein to thereby express MHC class I or MHC class II proteins on the cell surface. Expression of the appropriate class I or class II MHC in conjunction with a peptide having the activity of a B lymphocyte antigen (e.g., B7-1, B7-2, B7-3) induces a T cell mediated immune response against the transfected tumor cell. Optionally, a gene encoding an antisense construct which blocks expression of an MHC class II associated protein, such as the invariant chain, can also be cotransfected with a DNA encoding a peptide having the activity of a B lymphocyte antigen to promote presentation of tumor associated antigens and induce tumor specific immunity. Thus, the induction of a T cell mediated immune response in a human subject may be sufficient to overcome tumor-specific tolerance in the subject.

[0192] The activity of a protein of the invention may, among other means, be measured by the following methods:

[0193] Suitable assays for thymocyte or splenocyte cytotoxicity include, without limitation, those described in: Current Protocols in Immunology, Ed by J. E. Coligan, A. M. Kruisbeek, D. H. Margulies, E. M. Shevach, W. Strober, Pub. Greene Publishing Associates and Wiley-Interscience (Chapter 3, In Vitro assays for Mouse Lymphocyte Function 3.1-3.19; Chapter 7, Immunologic studies in Humans); Herrmann et al., Proc. Natl. Acad. Sci. USA 78:2488-2492, 1981; Herrmann et al., J. Immunol. 128:1968-1974, 1982; Handa et al., J. Immunol. 135:1564-1572, 1985; Takai et al., I. Immunol. 137:3494-3500, 1986; Takai et al., J. Immunol. 140:508-512, 1988; Bowman et al., J. Virology 61:1992-1998; Bertagnolli et al., Cellular Immunology 133:327-341, 1991; Brown et al., J. Imunol. 153:3079-3092, 1994.

[0194] Assays for T-cell-dependent immunoglobulin responses and isotype switching (which will identify, among others, proteins that modulate T-cell dependent antibody responses and that affect Th1/Th2 profiles) include, without limitation, those described in: Maliszewski, J. Immunol. 144:3028-3033, 1990; and Assays for B cell function: In vitro antibody production, Mond, J. J. and Brunswick, M. In Current Protocols in Immunology. J. E. e.a. Coligan eds. Vol 1 pp. 3.8.1-3.8.16, John Wiley and Sons, Toronto. 1994.

[0195] Mixed lymphocyte reaction (MLR) assays (which will identify, among others, proteins that generate predominantly Th1 and CTL responses) include, without limitation, those described in: Current Protocols in Immunology, Ed by J. E. Coligan, A. M. Kruisbeek, D. H. Margulies, E. M. Shevach, W. Strober, Pub. Greene Publishing Associates and Wiley-Interscience (Chapter 3, In Vitro assays for Mouse Lymphocyte Function 3.1-3.19; Chapter 7, Immunologic studies in Humans); Takai et al., J. Immunol. 137:3494-3500, 1986; Takai et al., J. Immunol. 140:508-512, 1988; Bertagnolli et al., J. Immunol. 149:3778-3783, 1992.

[0196] Dendritic cell-dependent assays (which will identify, among others, proteins expressed by dendritic cells that activate naive T-cells) include, without limitation, those described in: Guery et al., J. Immunol. 134:536-544, 1995; Inaba et al., Journal of Experimental Medicine 173:549-559, 1991; Macatonia et al., Journal of Immunology 154:5071-5079, 1995; Porgador et al., Journal of Experimental Medicine 182:255-260, 1995; Nair et al., Journal of Virology 67:4062-4069, 1993; Huang et al., Science 264:961-965, 1994; Macatonia et al., Journal of Experimental Medicine 169:1255-1264, 1989; Bhardwaj et al., Journal of Clinical Investigation 94:797-807, 1994; and Inaba et al., Journal of Experimental Medicine 172:631-640, 1990.

[0197] Assays for lymphocyte survival/apoptosis (which will identify, among others, proteins that prevent apoptosis after superantigen induction and proteins that regulate lymphocyte homeostasis) include, without limitation, those described in: Darzynkiewicz et al., Cytometry 13:795-808, 1992; Gorczyca et al., Leukemia 7:659-670, 1993; Gorczyca et al., Cancer Research 53:1945-1951, 1993; Itoh et al., Cell 66:233-243, 1991; Zacharchuk, Journal of Immunology 145:4037-4045, 1990; Zamai et al., Cytometry 14:891-897, 1993; Gorczyca et al., International Journal of Oncology 1:639-648, 1992.

[0198] Assays for proteins that influence early steps of T-cell commitment and development include, without limitation, those described in: Antica et al., Blood 84:111-117, 1994; Fineetal., Cellular Immunology 155:111-122, 1994; Galyetal., Blood 85:2770-2778, 1995; Toki et al., Proc. Nat. Acad. Sci. USA 88:7548-7551, 1991.

[0199] 4.7.8 Activin/Inhibin Activity

[0200] A polypeptide of the present invention may also exhibit activin- or inhibin-related activities. A polynucleotide of the invention may encode a polypeptide exhibiting such characteristics. Inhibins are characterized by their ability to inhibit the release of follicle stimulating hormone (FSH), while activins and are characterized by their ability to stimulate the release of follicle stimulating hormone (FSH). Thus, a polypeptide of the present invention, alone or in heterodimers with a member of the inhibin family, may be useful as a contraceptive based on the ability of inhibins to decrease fertility in female mammals and decrease spermatogenesis in male mammals. Administration of sufficient amounts of other inhibins can induce infertility in these mammals. Alternatively, the polypeptide of the invention, as a homodimer or as a heterodimer with other protein subunits of the inhibin group, may be useful as a fertility inducing therapeutic, based upon the ability of activin molecules in stimulating FSH release from cells of the anterior pituitary. See, for example, U.S. Pat. No. 4,798,885. A polypeptide of the invention may also be useful for advancement of the onset of fertility in sexually immature mammals, so as to increase the lifetime reproductive performance of domestic animals such as, but not limited to, cows, sheep and pigs.

[0201] The activity of a polypeptide of the invention may, among other means, be measured by the following methods.

[0202] Assays for activin/inhibin activity include, without limitation, those described in: Vale et al., Endocrinology 91:562-572, 1972; Ling et al., Nature 321:779-782, 1986; Vale et al., Nature 321:776-779, 1986; Mason et al., Nature 318:659-663, 1985; Forage et al., Proc. Natl. Acad. Sci. USA 83:3091-3095, 1986.

[0203] 4.7.9 Chemotactic/Chemokinetic Activity

[0204] A polypeptide of the present invention may be involved in chemotactic or chemokinetic activity for mammalian cells, including, for example, monocytes, fibroblasts, neutrophils, T-cells, mast cells, eosinophils, epithelial and/or endothelial cells. A polynucleotide of the invention can encode a polypeptide exhibiting such attributes. Chemotactic and chemokinetic receptor activation can be used to mobilize or attract a desired cell population to a desired site of action. Chemotactic or chemokinetic compositions (e.g. proteins, antibodies, binding partners, or modulators of the invention) provide particular advantages in treatment of wounds and other trauma to tissues, as well as in treatment of localized infections. For example, attraction of lymphocytes, monocytes or neutrophils to tumors or sites of infection may result in improved immune responses against the tumor or infecting agent.

[0205] A protein or peptide has chemotactic activity for a particular cell population if it can stimulate, directly or indirectly, the directed orientation or movement of such cell population. Preferably, the protein or peptide has the ability to directly stimulate directed movement of cells. Whether a particular protein has chemotactic activity for a population of cells can be readily determined by employing such protein or peptide in any known assay for cell chemotaxis.

[0206] Therapeutic compositions of the invention can be used in the following:

[0207] Assays for chemotactic activity (which will identify proteins that induce or prevent chemotaxis) consist of assays that measure the ability of a protein to induce the migration of cells across a membrane as well as the ability of a protein to induce the adhesion of one cell population to another cell population. Suitable assays for movement and adhesion include, without limitation, those described in: Current Protocols in hmunology, Ed by J. E. Coligan, A. M. Kruisbeek, D. H. Marguiles, E. M. Shevach, W. Strober, Pub. Greene Publishing Associates and Wiley-Interscience (Chapter 6.12, Measurement of alpha and beta Chemokines 6.12.1-6.12.28; Taub et al. J. Clin. Invest. 95:1370-1376, 1995; Lind et al. APMIS 103:140-146, 1995; Muller et al Eur. J. Immunol. 25:1744-1748; Gruber et al. J. of Immunol. 152:5860-5867, 1994; Johnston et al. J. of Immunol. 153:1762-1768, 1994.

[0208] 4.7.10 Hemostatic and Thrombolytic Activity

[0209] A polypeptide of the invention may also be involved in hemostatis or thrombolysis or thrombosis. A polynucleotide of the invention can encode a polypeptide exhibiting such attributes. Compositions may be useful in treatment of various coagulation disorders (including hereditary disorders, such as hemophilias) or to enhance coagulation and other hemostatic events in treating wounds resulting from trauma, surgery or other causes. A composition of the invention may also be useful for dissolving or inhibiting formation of thromboses and for treatment and prevention of conditions resulting therefrom (such as, for example, infarction of cardiac and central nervous system vessels (e.g., stroke).

[0210] Therapeutic compositions of the invention can be used in the following:

[0211] Assay for hemostatic and thrombolytic activity include, without limitation, those described in: Linet et al., J. Clin. Pharmacol. 26:131-140, 1986; Burdick et al., Thrombosis Res. 45:413-419, 1987; Humphrey et al., Fibrinolysis 5:71-79 (1991); Schaub, Prostaglandins 35:467474, 1988.

[0212] 4.7.11 Cancer Diagnosis and Therapy

[0213] Polypeptides of the invention may be involved in cancer cell generation, proliferation or metastasis. Detection of the presence or amount of polynucleotides or polypeptides of the invention may be useful for the diagnosis and/or prognosis of one or more types of cancer. For example, the presence or increased expression of a polynucleotide/polypeptide of the invention may indicate a hereditary risk of cancer, a precancerous condition, or an ongoing malignancy. Conversely, a defect in the gene or absence of the polypeptide may be associated with a cancer condition. Identification of single nucleotide polymorphisms associated with cancer or a predisposition to cancer may also be useful for diagnosis or prognosis.

[0214] Cancer treatments promote tumor regression by inhibiting tumor cell proliferation, inhibiting angiogenesis (growth of new blood vessels that is necessary to support tumor growth) and/or prohibiting metastasis by reducing tumor cell motility or invasiveness. Therapeutic compositions of the invention may be effective in adult and pediatric oncology including in solid phase tumors/malignancies, locally advanced tumors, human soft tissue sarcomas, metastatic cancer, including lymphatic metastases, blood cell malignancies including multiple myeloma, acute and chronic leukemias, and lymphomas, head and neck cancers including mouth cancer, larynx cancer and thyroid cancer, lung cancers including small cell carcinoma and non-small cell cancers, breast cancers including small cell carcinoma and ductal carcinoma, gastrointestinal cancers including esophageal cancer, stomach cancer, colon cancer, colorectal cancer and polyps associated with colorectal neoplasia, pancreatic cancers, liver cancer, urologic cancers including bladder cancer and prostate cancer, malignancies of the female genital tract including ovarian carcinoma, uterine (including endometrial) cancers, and solid tumor in the ovarian follicle, kidney cancers including renal cell carcinoma, brain cancers including intrinsic brain tumors, neuroblastoma, astrocytic brain tumors, gliomas, metastatic tumor cell invasion in the central nervous system, bone cancers including osteomas, skin cancers including malignant melanoma, tumor progression of human skin keratinocytes, squamous cell carcinoma, basal cell carcinoma, hemangiopericytoma and Karposi's sarcoma.

[0215] Polypeptides, polynucleotides, or modulators of polypeptides of the invention (including inhibitors and stimulators of the biological activity of the polypeptide of the invention) may be administered to treat cancer. Therapeutic compositions can be administered in therapeutically effective dosages alone or in combination with adjuvant cancer therapy such as surgery, chemotherapy, radiotherapy, thermotherapy, and laser therapy, and may provide a beneficial effect, e.g. reducing tumor size, slowing rate of tumor growth, inhibiting metastasis, or otherwise improving overall clinical condition, without necessarily eradicating the cancer.

[0216] The composition can also be administered in therapeutically effective amounts as a portion of an anti-cancer cocktail. An anti-cancer cocktail is a mixture of the polypeptide or modulator of the invention with one or more anti-cancer drugs in addition to a pharmaceutically acceptable carrier for delivery. The use of anti-cancer cocktails as a cancer treatment is routine. Anti-cancer drugs that are well known in the art and can be used as a treatment in combination with the polypeptide or modulator of the invention include: Actinomycin D, Aminoglutethimide, Asparaginase, Bleomycin, Busulfan, Carboplatin, Carmustine, Chlorambucil, Cisplatin (cis-DDP), Cyclophosphamide, Cytarabine HCl (Cytosine arabinoside), Dacarbazine, Dactinomycin, Daunorubicin HCl, Doxorubicin HCl, Estramustine phosphate sodium, Etoposide (V16-213), Floxuridine, 5-Fluorouracil (5-Fu), Flutamide, Hydroxyurea (hydroxycarbamide), Ifosfamide, Interferon Alpha-2a, Interferon Alpha-2b, Leuprolide acetate (LHRH-releasing factor analog), Lomustine, Mechlorethamine HCl (nitrogen mustard), Melphalan, Mercaptopurine, Mesna, Methotrexate (MTX), Mitomycin, Mitoxantrone HCl, Octreotide, Plicamycin, Procarbazine HCl, Streptozocin, Tamoxifen citrate, Thioguanine, Thiotepa, Vinblastine sulfate, Vincristine sulfate, Amsacrine, Azacitidine, Hexamethylmelamine, Interleukin-2, Mitoguazone, Pentostatin, Semustine, Teniposide, and Vindesine sulfate.

[0217] In addition, therapeutic compositions of the invention may be used for prophylactic treatment of cancer. There are hereditary conditions and/or environmental situations (e.g. exposure to carcinogens) known in the art that predispose an individual to developing cancers. Under these circumstances, it may be beneficial to treat these individuals with therapeutically effective doses of the polypeptide of the invention to reduce the risk of developing cancers.

[0218] In vitro models can be used to determine the effective doses of the polypeptide of the invention as a potential cancer treatment. These in vitro models include proliferation assays of cultured tumor cells, growth of cultured tumor cells in soft agar (see Freshney, (1987) Culture of Animal Cells: A Manual of Basic Technique, Wily-Liss, New York, N.Y. Ch 18 and Ch 21), tumor systems in nude mice as described in Giovanella et al., J. Natl. Can. Inst., 52: 921-30 (1974), mobility and invasive potential of tumor cells in Boyden Chamber assays as described in Pilkington et al., Anticancer Res., 17: 4107-9 (1997), and angiogenesis assays such as induction of vascularization of the chick chorioallantoic membrane or induction of vascular endothelial cell migration as described in Ribatta et al., Intl. J. Dev. Biol., 40: 1189-97 (1999) and Li et al., Clin. Exp. Metastasis, 17:423-9 (1999), respectively. Suitable tumor cells lines are available, e.g. from American Type Tissue Culture Collection catalogs.

[0219] 4.7.12 Receptor/Ligand activity

[0220] A polypeptide of the present invention may also demonstrate activity as receptor, receptor ligand or inhibitor or agonist of receptor/ligand interactions. A polynucleotide of the invention can encode a polypeptide exhibiting such characteristics. Examples of such receptors and ligands include, without limitation, cytokine receptors and their ligands, receptor kinases and their ligands, receptor phosphatases and their ligands, receptors involved in cell-cell interactions and their ligands (including without limitation, cellular adhesion molecules (such as selecting, integrins and their ligands) and receptor/ligand pairs involved in antigen presentation, antigen recognition and development of cellular and humoral immune responses. Receptors and ligands are also useful for screening of potential peptide or small molecule inhibitors of the relevant receptor/ligand interaction. A protein of the present invention (including, without limitation, fragments of receptors and ligands) may themselves be useful as inhibitors of receptor/ligand interactions.

[0221] The activity of a polypeptide of the invention may, among other means, be measured by the following methods:

[0222] Suitable assays for receptor-ligand activity include without limitation those described in: Current Protocols in Immunology, Ed by J. E. Coligan, A. M. Kruisbeek, D. H. Margulies, E. M. Shevach, W. Strober, Pub. Greene Publishing Associates and Wiley—Interscience (Chapter 7.28, Measurement of Cellular Adhesion under static conditions 7.28.1-7.28.22), Takai et al., Proc. Natl. Acad. Sci. USA 84:6864-6868, 1987; Bierer et al., J. Exp. Med. 168:1145-1156, 1988; Rosenstein et al., J. Exp. Med. 169:149-160 1989; Stoltenborg et al., J. immunol. Methods 175:59-68, 1994; Stitt et al., Cell 80:661-670, 1995.

[0223] By way of example, the polypeptides of the invention may be used as a receptor for a ligand(s) thereby transmitting the biological activity of that ligand(s). Ligands may be identified through binding assays, affinity chromatography, dihybrid screening assays, BIAcore assays, gel overlay assays, or other methods known in the art.

[0224] Studies characterizing drugs or proteins as agonist or antagonist or partial agonists or a partial antagonist require the use of other proteins as competing ligands. The polypeptides of the present invention or ligand(s) thereof may be labeled by being coupled to radioisotopes, colorimetric molecules or a toxin molecules by conventional methods. (“Guide to Protein Purification” Murray P. Deutscher (ed) Methods in Enzymology Vol. 182 (1990) Academic Press, Inc. San Diego). Examples of radioisotopes include, but are not limited to, tritium and carbon-14. Examples of colorimetric molecules include, but are not limited to, fluorescent molecules such as fluorescamine, or rhodamine or other calorimetric molecules. Examples of toxins include, but are not limited, to ricin.

[0225] 4.7.13 Drug Screening

[0226] This invention is particularly useful for screening chemical compounds by using the novel polypeptides or binding fragments thereof in any of a variety of drug screening techniques. The polypeptides or fragments employed in such a test may either be free in solution, affixed to a solid support, borne on a cell surface or located intracellularly. One method of drug screening utilizes eukaryotic or prokaryotic host cells which are stably transformed with recombinant nucleic acids expressing the polypeptide or a fragment thereof. Drugs are screened against such transformed cells in competitive binding assays. Such cells, either in viable or fixed form, can be used for standard binding assays. One may measure, for example, the formation of complexes between polypeptides of the invention or fragments and the agent being tested or examine the diminution in complex formation between the novel polypeptides and an appropriate cell line, which are well known in the art.

[0227] Sources for test compounds that may be screened for ability to bind to or modulate (i.e., increase or decrease) the activity of polypeptides of the invention include (1) inorganic and organic chemical libraries, (2) natural product libraries, and (3) combinatorial libraries comprised of either random or mimetic peptides, oligonucleotides or organic molecules.

[0228] Chemical libraries may be readily synthesized or purchased from a number of commercial sources, and may include structural analogs of known compounds or compounds that are identified as “hits” or “leads” via natural product screening.

[0229] The sources of natural product libraries are microorganisms (including bacteria and fungi), animals, plants or other vegetation, or marine organisms, and libraries of mixtures for screening may be created by: (1) fermentation and extraction of broths from soil, plant or marine microorganisms or (2) extraction of the organisms themselves. Natural product libraries include polyketides, non-ribosomal peptides, and (non-naturally occurring) variants thereof. For a review, see Science 282:63-68 (1998).

[0230] Combinatorial libraries are composed of large numbers of peptides, oligonucleotides or organic compounds and can be readily prepared by traditional automated synthesis methods, PCR, cloning or proprietary synthetic methods. Of particular interest are peptide and oligonucleotide combinatorial libraries. Still other libraries of interest include peptide, protein, peptidomimetic, multiparallel synthetic collection, recombinatorial, and polypeptide libraries. For a review of combinatorial chemistry and libraries created therefrom, see Myers, Curr. Opin. Biotechnol. 8:701-707 (1997). For reviews and examples of peptidomimetic libraries, see Al-Obeidi et al., Mol. Biotechnol, 9(3):205-23 (1998); Hruby et al., Curr Opin Chem Biol, 1(1):114-19 (1997); Dorner et al., Bioorg Med Chem, 4(5):709-15 (1996) (alkylated dipeptides).

[0231] Identification of modulators through use of the various libraries described herein permits modification of the candidate “hit” (or “lead”) to optimize the capacity of the “hit” to bind a polypeptide of the invention. The molecules identified in the binding assay are then tested for antagonist or agonist activity in in vivo tissue culture or animal models that are well known in the art. In brief, the molecules are titrated into a plurality of cell cultures or animals and then tested for either cell/animal death or prolonged survival of the animal/cells.

[0232] The binding molecules thus identified may be complexed with toxins, e.g., ricin or cholera, or with other compounds that are toxic to cells such as radioisotopes. The toxin-binding molecule complex is then targeted to a tumor or other cell by the specificity of the binding molecule for a polypeptide of the invention. Alternatively, the binding molecules may be complexed with imaging agents for targeting and imaging purposes.

[0233] 4.7.14 Assay for Receptor Activity

[0234] The invention also provides methods to detect specific binding of a polypeptide e.g. a ligand or a receptor. The art provides numerous assays particularly useful for identifying previously unknown binding partners for receptor polypeptides of the invention. For example, expression cloning using mammalian or bacterial cells, or dihybrid screening assays can be used to identify polynucleotides encoding binding partners. As another example, affinity chromatography with the appropriate immobilized polypeptide of the invention can be used to isolate polypeptides that recognize and bind polypeptides of the invention. There are a number of different libraries used for the identification of compounds, and in particular small molecules, that modulate (i.e., increase or decrease) biological activity of a polypeptide of the invention. Ligands for receptor polypeptides of the invention can also be identified by adding exogenous ligands, or cocktails of ligands to two cells populations that are genetically identical except for the expression of the receptor of the invention: one cell population expresses the receptor of the invention whereas the other does not. The response of the two cell populations to the addition of ligands(s) are then compared. Alternatively, an expression library can be co-expressed with the polypeptide of the invention in cells and assayed for an autocrine response to identify potential ligand(s). As still another example, BIAcore assays, gel overlay assays, or other methods known in the art can be used to identify binding partner polypeptides, including, (1) organic and inorganic chemical libraries, (2) natural product libraries, and (3) combinatorial libraries comprised of random peptides, oligonucleotides or organic molecules.

[0235] The role of downstream intracellular signaling molecules in the signaling cascade of the polypeptide of the invention can be determined. For example, a chimeric protein in which the cytoplasmic domain of the polypeptide of the invention is fused to the extracellular portion of a protein, whose ligand has been identified, is produced in a host cell. The cell is then incubated with the ligand specific for the extracellular portion of the chimeric protein, thereby activating the chimeric receptor. Known downstream proteins involved in intracellular signaling can then be assayed for expected modifications i.e. phosphorylation. Other methods known to those in the art can also be used to identify signaling molecules involved in receptor activity.

[0236] 4.7.15 Anti-Inflammatory Activity

[0237] Compositions of the present invention may also exhibit anti-inflammatory activity. The anti-inflammatory activity may be achieved by providing a stimulus to cells involved in the inflammatory response, by inhibiting or promoting cell-cell interactions (such as, for example, cell adhesion), by inhibiting or promoting chemotaxis of cells involved in the inflammatory process, inhibiting or promoting cell extravasation, or by stimulating or suppressing production of other factors which more directly inhibit or promote an inflammatory response. Compositions with such activities can be used to treat inflammatory conditions including chronic or acute conditions), including without limitation intimation associated with infection (such as septic shock, sepsis or systemic inflammatory response syndrome (SIRS)), ischemia-reperfusion injury, endotoxin lethality, arthritis, complement-mediated hyperacute rejection, nephritis, cytokine or chemokine-induced lung injury, inflammatory bowel disease, Crohn's disease or resulting from over production of cytokines such as TNF or IL-1. Compositions of the invention may also be useful to treat anaphylaxis and hypersensitivity to an antigenic substance or material. Compositions of this invention may be utilized to prevent or treat conditions such as, but not limited to, sepsis, acute pancreatitis, endotoxin shock, cytokine induced shock, rheumatoid arthritis, chronic inflammatory arthritis, pancreatic cell damage from diabetes mellitus type 1, graft versus host disease, inflammatory bowel disease, inflamation associated with pulmonary disease, other autoimmune disease or inflammatory disease, an antiproliferative agent such as for acute or chronic mylegenous leukemia or in the prevention of premature labor secondary to intrauterine infections.

[0238] 4.7.16 Leukemias

[0239] Leukemias and related disorders may be treated or prevented by administration of a therapeutic that promotes or inhibits function of the polynucleotides and/or polypeptides of the invention. Such leukemias and related disorders include but are not limited to acute leukemia, acute lymphocytic leukemia, acute myelocytic leukemia, myeloblastic, promyelocytic, myelomonocytic, monocytic, erythroleukemia, chronic leukemia, chronic myelocytic (granulocytic) leukemia and chronic lymphocytic leukemia (for a review of such disorders, see Fishman et al., 1985, Medicine, 2d Ed., J.B. Lippincott Co., Philadelphia).

[0240] 4.7.17 Nervous System Disorders

[0241] Nervous system disorders, involving cell types which can be tested for efficacy of intervention with compounds that modulate the activity of the polynucleotides and/or polypeptides of the invention, and which can be treated upon thus observing an indication of therapeutic utility, include but are not limited to nervous system injuries, and diseases or disorders which result in either a disconnection of axons, a diminution or degeneration of neurons, or demyelination. Nervous system lesions which may be treated in a patient (including human and non-human mammalian patients) according to the invention include but are not limited to the following lesions of either the central (including spinal cord, brain) or peripheral nervous systems:

[0242] (i) traumatic lesions, including lesions caused by physical injury or associated with surgery, for example, lesions which sever a portion of the nervous system, or compression injuries;

[0243] (ii) ischemic lesions, in which a lack of oxygen in a portion of the nervous system results in neuronal injury or death, including cerebral infarction or ischemia, or spinal cord infarction or ischemia;

[0244] (iii) infectious lesions, in which a portion of the nervous system is destroyed or injured as a result of infection, for example, by an abscess or associated with infection by human immunodeficiency virus, herpes zoster, or herpes simplex virus or with Lyme disease, tuberculosis, syphilis;

[0245] (iv) degenerative lesions, in which a portion of the nervous system is destroyed or injured as a result of a degenerative process including but not limited to degeneration associated with Parkinson's disease, Alzheimer's disease, Huntington's chorea, or amyotrophic lateral sclerosis;

[0246] (v) lesions associated with nutritional diseases or disorders, in which a portion of the nervous system is destroyed or injured by a nutritional disorder or disorder of metabolism including but not limited to, vitamin B12 deficiency, folic acid deficiency, Wernicke disease, tobacco-alcohol amblyopia, Marchiafava-Bignami disease (primary degeneration of the corpus callosum), and alcoholic cerebellar degeneration;

[0247] (vi) neurological lesions associated. with systemic diseases including but not limited to diabetes (diabetic neuropathy, Bell's palsy), systemic lupus erythematosus, carcinoma, or sarcoidosis;

[0248] (vii) lesions caused by toxic substances including alcohol, lead, or particular neurotoxins; and

[0249] (viii) demyelinated lesions in which a portion of the nervous system is destroyed or injured by a demyelinating disease including but not limited to multiple sclerosis, human immunodeficiency virus-associated myelopathy, transverse myelopathy or various etiologies, progressive multifocal leukoencephalopathy, and central pontine myelinolysis.

[0250] Therapeutics which are useful according to the invention for treatment of a nervous system disorder may be selected by testing for biological activity in promoting the survival or differentiation of neurons. For example, and not by way of limitation, therapeutics which elicit any of the following effects may be useful according to the invention:

[0251] (i) increased survival time of neurons in culture;

[0252] (ii) increased sprouting of neurons in culture or in vivo;

[0253] (iii) increased production of a neuron-associated molecule in culture or in vivo, e.g., choline acetyltransferase or acetylcholinesterase with respect to motor neurons; or

[0254] (iv) decreased symptoms of neuron dysfunction in vivo.

[0255] Such effects may be measured by any method known in the art. In preferred, non-limiting embodiments, increased survival of neurons may be measured by the method set forth in Arakawa et al. (1990, J. Neurosci. 10:3507-3515); increased sprouting of neurons may be detected by methods set forth in Pestronk et al. (1980, Exp. Neurol. 70:65-82) or Brown et al. (1981, Ann. Rev. Neurosci. 4:17-42); increased production of neuron-associated molecules may be measured by bioassay, enzymatic assay, antibody binding, Northern blot assay, etc., depending on the molecule to be measured; and motor neuron dysfunction may be measured by assessing the physical manifestation of motor neuron disorder, e.g., weakness, motor neuron conduction velocity, or functional disability.

[0256] In specific embodiments, motor neuron disorders that may be treated according to the invention include but are not limited to disorders such as infarction, infection, exposure to toxin, trauma, surgical damage, degenerative disease or malignancy that may affect motor neurons as well as other components of the nervous system, as well as disorders that selectively affect neurons such as amyotrophic lateral sclerosis, and including but not limited to progressive spinal muscular atrophy, progressive bulbar palsy, primary lateral sclerosis, infantile and juvenile muscular atrophy, progressive bulbar paralysis of childhood (Fazio-Londe syndrome), poliomyelitis and the post polio syndrome, and Hereditary Motorsensory Neuropathy (Charcot-Marie-Tooth Disease).

[0257] 4.7.18 Other Activities

[0258] A polypeptide of the invention may also exhibit one or more of the following additional activities or effects: inhibiting the growth, infection or function of, or killing, infectious agents, including, without limitation, bacteria, viruses, fungi and other parasites; effecting (suppressing or enhancing) bodily characteristics, including, without limitation, height, weight, hair color, eye color, skin, fat to lean ratio or other tissue pigmentation, or organ or body part size or shape (such as, for example, breast augmentation or diminution, change in bone form or shape); effecting biorhythms or circadian cycles or rhythms; effecting the fertility of male or female subjects; effecting the metabolism, catabolism, anabolism, processing, utilization, storage or elimination of dietary fat, lipid, protein, carbohydrate, vitamins, minerals, co-factors or other nutritional factors or component(s); effecting behavioral characteristics, including, without limitation, appetite, libido, stress, cognition (including cognitive disorders), depression (including depressive disorders) and violent behaviors; providing analgesic effects or other pain reducing effects; promoting differentiation and growth of embryonic stem cells in lineages other than hematopoietic lineages; hormonal or endocrine activity; in the case of enzymes, correcting deficiencies of the enzyme and treating deficiency-related diseases; treatment of hyperproliferative disorders (such as, for example, psoriasis); immunoglobulin-like activity (such as, for example, the ability to bind antigens or complement); and the ability to act as an antigen in a vaccine composition to raise an immune response against such protein or another material or entity which is cross-reactive with such protein.

[0259] 4.7.19 Identification of Polymorphisms

[0260] The demonstration of polymorphisms makes possible the identification of such polymorphisms in human subjects and the pharmacogenetic use of this information for diagnosis and treatment. Such polymorphisms may be associated with, e.g., differential predisposition or susceptibility to various disease states (such as disorders involving inflammation or immune response) or a differential response to drug administration, and this genetic information can be used to tailor preventive or therapeutic treatment appropriately. For example, the existence of a polymorphism associated with a predisposition to inflammation or autoimmune disease makes possible the diagnosis of this condition in humans by identifying the presence of the polymorphism.

[0261] Polymorphisms can be identified in a variety of ways known in the art which all generally involve obtaining a sample from a patient, analyzing DNA from the sample, optionally involving isolation or amplification of the DNA, and identifying the presence of the polymorphism in the DNA. For example, PCR may be used to amplify an appropriate fragment of genomic DNA which may then be sequenced. Alternatively, the DNA may be subjected to allele-specific oligonucleotide hybridization (in which appropriate oligonucleotides are hybridized to the DNA under conditions permitting detection of a single base mismatch) or to a single nucleotide extension assay (in which an oligonucleotide that hybridizes immediately adjacent to the position of the polymorphism is extended with one or more labeled nucleotides). In addition, traditional restriction fragment length polymorphism analysis (using restriction enzymes that provide differential digestion of the genomic DNA depending on the presence or absence of the polymorphism) may be performed. Arrays with nucleotide sequences of the present invention can be used to detect polymorphisms. The array can comprise modified nucleotide sequences of the present invention in order to detect the nucleotide sequences of the present invention. In the alternative, any one of the nucleotide sequences of the present invention can be placed on the array to detect changes from those sequences.

[0262] Alternatively a polymorphism resulting in a change in the amino acid sequence could also be detected by detecting a corresponding change in amino acid sequence of the protein, e.g., by an antibody specific to the variant sequence.

[0263] 4.7.20 Arthritis and Inflammation

[0264] The immunosuppressive effects of the compositions of the invention against rheumatoid arthritis is determined in an experimental animal model system. The experimental model system is adjuvant induced arthritis in rats, and the protocol is described by J. Holoshitz, et al., 1983, Science, 219:56, or by B. Waksman et al., 1963, Int. Arch. Allergy Appl. Immunol., 23:129. Induction of the disease can be caused by a single injection, generally intradermally, of a suspension of killed Mycobacterium tuberculosis in complete Freund's adjuvant (CFA). The route of injection can vary, but rats may be injected at the base of the tail with an adjuvant mixture. The polypeptide is administered in phosphate buffered solution (PBS) at a dose of about 1-5 mg/kg. The control consists of administering PBS only.

[0265] The procedure for testing the effects of the test compound would consist of intradermally injecting killed Mycobacterium tuberculosis in CFA followed by immediately administering the test compound and subsequent treatment every other day until day 24. At 14, 15, 18, 20, 22, and 24 days after injection of Mycobacterium CFA, an overall arthritis score may be obtained as described by J. Holoskitz above. An analysis of the data would reveal that the test compound would have a dramatic affect on the swelling of the joints as measured by a decrease of the arthritis score.

[0266] 4.8 Therapeutic Methods

[0267] The compositions (including polypeptide fragments, analogs, variants and antibodies or other binding partners or modulators including antisense polynucleotides) of the invention have numerous applications in a variety of therapeutic methods. Examples of therapeutic applications include, but are not limited to, those exemplified herein.

### 4.8.1 EXAMPLE

[0268] One embodiment of the invention is the administration of an effective amount of the polypeptides or other composition of the invention to individuals affected by a disease or disorder that can be modulated by regulating the peptides of the invention. While the mode of administration is not particularly important, parenteral administration is preferred. An exemplary mode of administration is to deliver an intravenous bolus. The dosage of the polypeptides or other composition of the invention will normally be determined by the prescribing physician. It is to be expected that the dosage will vary according to the age, weight, condition and response of the individual patient. Typically, the amount of polypeptide administered per dose will be in the range of about 0.01 μg/kg to 100 mg/kg of body weight, with the preferred dose being about 0.1 μg/kg to 10 mg/kg of patient body weight. For parenteral administration, polypeptides of the invention will be formulated in an injectable form combined with a pharmaceutically acceptable parenteral vehicle. Such vehicles are well known in the art and examples include water, saline, Ringer's solution, dextrose solution, and solutions consisting of small amounts of the human serum albumin. The vehicle may contain minor amounts of additives that maintain the isotonicity and stability of the polypeptide or other active ingredient. The preparation of such solutions is within the skill of the art.

[0269] 4.9 Pharmaceutical Formulations and Routes of Administration

[0270] A protein or other composition of the present invention (from whatever source derived, including without limitation from recombinant and non-recombinant sources and including antibodies and other binding partners of the polypeptides of the invention) may be administered to a patient in need, by itself, or in pharmaceutical compositions where it is mixed with suitable carriers or excipient(s) at doses to treat or ameliorate a variety of disorders. Such a composition may optionally contain (in addition to protein or other active ingredient and a carrier) diluents, fillers, salts, buffers, stabilizers, solubilizers, and other materials well known in the art. The term “pharmaceutically acceptable” means a non-toxic material that does not interfere with the effectiveness of the biological activity of the active ingredient(s). The characteristics of the carrier will depend on the route of administration. The pharmaceutical composition of the invention may also contain cytokines, lymphokines, or other hematopoietic factors such as M-CSF, GM-CSF, TNF, IL-1, IL-2, IL-3, IL-4, IL-5, IL-6, IL-7, IL-8, IL-9, IL-10, IL-11, IL-12, IL-13, IL-14, IL-15, IFN, TNFO, TNF1, TNF2, G-CSF, Meg-CSF, thrombopoietin, stem cell factor, and erythropoietin. In further compositions, proteins of the invention may be combined with other agents beneficial to the treatment of the disease or disorder in question. These agents include various growth factors such as epidermal growth factor (EGF), platelet-derived growth factor (PDGF), transforming growth factors (TGF-α and TGF-), insulin-like growth factor (IGF), as well as cytokines described herein.

[0271] The pharmaceutical composition may further contain other agents which either enhance the activity of the protein or other active ingredient or complement its activity or use in treatment. Such additional factors and/or agents may be included in the pharmaceutical composition to produce a synergistic effect with protein or other active ingredient of the invention, or to minimize side effects. Conversely, protein or other active ingredient of the present invention may be included in formulations of the particular clotting factor, cytokine, lymphokine, other hematopoietic factor, thrombolytic or anti-thrombotic factor, or anti-inflammatory agent to minimize side effects of the clotting factor, cytokine, lymphokine, other hematopoietic factor, thrombolytic or anti-thrombotic factor, or anti-inflammatory agent (such as IL-lRa, IL-1 Hyl, IL-1 Hy2, anti-TNF, corticosteroids, immunosuppressive agents). A protein of the present invention may be active in multimers (e.g., heterodimers or homodimers) or complexes with itself or other proteins. As a result, pharmaceutical compositions of the invention may comprise a protein of the invention in such multimeric or complexed form.

[0272] As an alternative to being included in a pharmaceutical composition of the invention including a first protein, a second protein or a therapeutic agent may be concurrently administered with the first protein (e.g., at the same time, or at differing times provided that therapeutic concentrations of the combination of agents is achieved at the treatment site). Techniques for formulation and administration of the compounds of the instant application may be found in “Remington's Pharmaceutical Sciences,” Mack Publishing Co., Easton, Pa., latest edition. A therapeutically effective dose further refers to that amount of the compound sufficient to result in amelioration of symptoms, e.g., treatment, healing, prevention or amelioration of the relevant medical condition, or an increase in rate of treatment, healing, prevention or amelioration of such conditions. When applied to an individual active ingredient, administered alone, a therapeutically effective dose refers to that ingredient alone. When applied to a combination, a therapeutically effective dose refers to combined amounts of the active ingredients that result in the therapeutic effect, whether administered in combination, serially or simultaneously.

[0273] In practicing the method of treatment or use of the present invention, a therapeutically effective amount of protein or other active ingredient of the present invention is administered to a mammal having a condition to be treated. Protein or other active ingredient of the present invention may be administered in accordance with the method of the invention either alone or in combination with other therapies such as treatments employing cytokines, lymphokines or other hematopoietic factors. When co-administered with one or more cytokines, lymphokines or other hematopoietic factors, protein or other active ingredient of the present invention may be administered either simultaneously with the cytokine(s), lymphokine(s), other hematopoietic factor(s), thrombolytic or anti-thrombotic factors, or sequentially. If administered sequentially, the attending physician will decide on the appropriate sequence of administering protein or other active ingredient of the present invention in combination with cytokine(s), lymphokine(s), other hematopoietic factor(s), thrombolytic or anti-thrombotic factors.

[0274] 4.9.1 Routes of Administration

[0275] Suitable routes of administration may, for example, include oral, rectal, transmucosal, or intestinal administration; parenteral delivery, including intramuscular, subcutaneous, intramedullary injections, as well as intrathecal, direct intraventricular, intravenous, intraperitoneal, intranasal, or intraocular injections. Administration of protein or other active ingredient of the present invention used in the pharmaceutical composition or to practice the method of the present invention can be carried out in a variety of conventional ways, such as oral ingestion, inhalation, topical application or cutaneous, subcutaneous, intraperitoneal, parenteral or intravenous injection. Intravenous administration to the patient is preferred.

[0276] Alternately, one may administer the compound in a local rather than systemic manner, for example, via injection of the compound directly into a arthritic joints or in fibrotic tissue, often in a depot or sustained release formulation. In order to prevent the scarring process frequently occurring as complication of glaucoma surgery, the compounds may be administered topically, for example, as eye drops. Furthermore, one may administer the drug in a targeted drug delivery system, for example, in a liposome coated with a specific antibody, targeting, for example, arthritic or fibrotic tissue. The liposomes will be targeted to and taken up selectively by the afflicted tissue.

[0277] The polypeptides of the invention are administered by any route that delivers an effective dosage to the desired site of action. The determination of a suitable route of administration and an effective dosage for a particular indication is within the level of skill in the art. Preferably for wound treatment, one administers the therapeutic compound directly to the site. Suitable dosage ranges for the polypeptides of the invention can be extrapolated from these dosages or from similar studies in appropriate aninal models. Dosages can then be adjusted as necessary by the clinician to provide maximal therapeutic benefit.

[0278] 4.9.2 Compositions/Formulations

[0279] Pharmaceutical compositions for use in accordance with the present invention thus may be formulated in a conventional manner using one or more physiologically acceptable carriers comprising excipients and auxiliaries which facilitate processing of the active compounds into preparations which can be used pharmaceutically. These pharmaceutical compositions may be manufactured in a manner that is itself known, e.g., by means of conventional mixing, dissolving, granulating, dragee-making, levigating, emulsifying, encapsulating, entrapping or lyophilizing processes. Proper formulation is dependent upon the route of administration chosen. When a therapeutically effective amount of protein or other active ingredient of the present invention is administered orally, protein or other active ingredient of the present invention will be in the form of a tablet, capsule, powder, solution or elixir. When administered in tablet form, the pharmaceutical composition of the invention may additionally contain a solid carrier such as a gelatin or an adjuvant. The tablet, capsule, and powder contain from about 5 to 95% protein or other active ingredient of the present invention, and preferably from about 25 to 90% protein or other active ingredient of the present invention. When administered in liquid form, a liquid carrier such as water, petroleum, oils of animal or plant origin such as peanut oil, mineral oil, soybean oil, or sesame oil, or synthetic oils may be added. The liquid form of the pharmaceutical composition may further contain physiological saline solution, dextrose or other saccharide solution, or glycols such as ethylene glycol, propylene glycol or polyethylene glycol. When administered in liquid form, the pharmaceutical composition contains from about 0.5 to 90% by weight of protein or other active ingredient of the present invention, and preferably from about 1 to 50% protein or other active ingredient of the present invention.

[0280] When a therapeutically effective amount of protein or other active ingredient of the present invention is administered by intravenous, cutaneous or subcutaneous injection, protein or other active ingredient of the present invention will be in the form of a pyrogen-free, parenterally acceptable aqueous solution. The preparation of such parenterally acceptable protein or other active ingredient solutions, having due regard to pH, isotonicity, stability, and the like, is within the skill in the art. A preferred pharmaceutical composition for intravenous, cutaneous, or subcutaneous injection should contain, in addition to protein or other active ingredient of the present invention, an isotonic vehicle such as Sodium Chloride Injection, Ringer's Injection, Dextrose Injection, Dextrose and Sodium Chloride Injection, Lactated Ringer's Injection, or other vehicle as known in the art. The pharmaceutical composition of the present invention may also contain stabilizers, preservatives, buffers, antioxidants, or other additives known to those of skill in the art. For injection, the agents of the invention may be formulated in aqueous solutions, preferably in physiologically compatible buffers such as Hanks's solution, Ringer's solution, or physiological saline buffer. For transmucosal administration, penetrants appropriate to the barrier to be permeated are used in the formulation. Such penetrants are generally known in the art.

[0281] For oral administration, the compounds can be formulated readily by combining the active compounds with pharmaceutically acceptable carriers well known in the art. Such carriers enable the compounds of the invention to be formulated as tablets, pills, dragees, capsules, liquids, gels, syrups, slurries, suspensions and the like, for oral ingestion by a patient to be treated. Pharmaceutical preparations for oral use can be obtained from a solid excipient, optionally grinding a resulting mixture, and processing the mixture of granules, after adding suitable auxiliaries, if desired, to obtain tablets or dragee cores. Suitable excipients are, in particular, fillers such as sugars, including lactose, sucrose, mannitol, or sorbitol; cellulose preparations such as, for example, maize starch, wheat starch, rice starch, potato starch, gelatin, gum tragacanth, methyl cellulose, hydroxypropylmethyl-cellulose, sodium carboxymethylcellulose, and/or polyvinylpyrrolidone (PVP). If desired, disintegrating agents may be added, such as the cross-linked polyvinyl pyrrolidone, agar, or alginic acid or a salt thereof such as sodium alginate. Dragee cores are provided with suitable coatings. For this purpose, concentrated sugar solutions may be used, which may optionally contain gum arabic, talc, polyvinyl pyrrolidone, carbopol gel, polyethylene glycol, and/or titanium dioxide, lacquer solutions, and suitable organic solvents or solvent mixtures. Dyestuffs or pigments may be added to the tablets or dragee coatings for identification or to characterize different combinations of active compound doses.

[0282] Pharmaceutical preparations which can be used orally include push-fit capsules made of gelatin, as well as soft, sealed capsules made of gelatin and a plasticizer, such as glycerol or sorbitol. The push-fit capsules can contain the active ingredients in admixture with filler such as lactose, binders such as starches, and/or lubricants such as talc or magnesium stearate and, optionally, stabilizers. In soft capsules, the active compounds may be dissolved or suspended in suitable liquids, such as fatty oils, liquid paraffin, or liquid polyethylene glycols. In addition, stabilizers may be added. All formulations for oral administration should be in dosages suitable for such administration. For buccal administration, the compositions may take the form of tablets or lozenges formulated in conventional manner.

[0283] For administration by inhalation, the compounds for use according to the present invention are conveniently delivered in the form of an aerosol spray presentation from pressurized packs or a nebuliser, with the use of a suitable propellant, e.g., dichlorodifluoromethane, trichlorofluoromethane, dichlorotetrafluoroethane, carbon dioxide or other suitable gas. In the case of a pressurized aerosol the dosage unit may be determined by providing a valve to deliver a metered amount. Capsules and cartridges of, e.g., gelatin for use in an inhaler or insufflator may be formulated containing a powder mix of the compound and a suitable powder base such as lactose or starch. The compounds may be formulated for parenteral administration by injection, e.g., by bolus injection or continuous infusion. Formulations for injection may be presented in unit dosage form, e.g., in ampules or in multi-dose containers, with an added preservative. The compositions may take such forms as suspensions, solutions or emulsions in oily or aqueous vehicles, and may contain formulatory agents such as suspending, stabilizing and/or dispersing agents.

[0284] Pharmaceutical formulations for parenteral administration include aqueous solutions of the active compounds in water-soluble form. Additionally, suspensions of the active compounds may be prepared as appropriate oily injection suspensions. Suitable lipophilic solvents or vehicles include fatty oils such as sesame oil, or synthetic fatty acid esters, such as ethyl oleate or triglycerides, or liposomes. Aqueous injection suspensions may contain substances which increase the viscosity of the suspension, such as sodium carboxymethyl cellulose, sorbitol, or dextran. Optionally, the suspension may also contain suitable stabilizers or agents which increase the solubility of the compounds to allow for the preparation of highly concentrated solutions. Alternatively, the active ingredient may be in powder form for constitution with a suitable vehicle, e.g., sterile pyrogen-free water, before use.

[0285] The compounds may also be formulated in rectal compositions such as suppositories or retention enemas, e.g., containing conventional suppository bases such as cocoa butter or other glycerides. In addition to the formulations described previously, the compounds may also be formulated as a depot preparation. Such long acting formulations may be administered by implantation (for example subcutaneously or intramuscularly) or by intramuscular injection. Thus, for example, the compounds may be formulated with suitable polymeric or hydrophobic materials (for example as an emulsion in an acceptable oil) or ion exchange resins, or as sparingly soluble derivatives, for example, as a sparingly soluble salt.

[0286] A pharmaceutical carrier for the hydrophobic compounds of the invention is a co-solvent system comprising benzyl alcohol, a nonpolar surfactant, a water-miscible organic polymer, and an aqueous phase. The co-solvent system may be the VPD co-solvent system. VPD is a solution of 3% w/v benzyl alcohol, 8% w/v of the nonpolar surfactant polysorbate 80, and 65% w/v polyethylene glycol 300, made up to volume in absolute ethanol. The VPD co-solvent system (VPD:5W) consists of VPD diluted 1:1 with a 5% dextrose in water solution. This co-solvent system dissolves hydrophobic compounds well, and itself produces low toxicity upon systemic administration. Naturally, the proportions of a co-solvent system may be varied considerably without destroying its solubility and toxicity characteristics. Furthermore, the identity of the co-solvent components may be varied: for example, other low-toxicity nonpolar surfactants may be used instead of polysorbate 80; the fraction size of polyethylene glycol may be varied; other biocompatible polymers may replace polyethylene glycol, e.g. polyvinyl pyrrolidone; and other sugars or polysaccharides may substitute for dextrose. Alternatively, other delivery systems for hydrophobic pharmaceutical compounds may be employed. Liposomes and emulsions are well known examples of delivery vehicles or carriers for hydrophobic drugs. Certain organic solvents such as dimethylsulfoxide also may be employed, although usually at the cost of greater toxicity. Additionally, the compounds may be delivered using a sustained-release system, such as semipermeable matrices of solid hydrophobic polymers containing the therapeutic agent. Various types of sustained-release materials have been established and are well known by those skilled in the art. Sustained-release capsules may, depending on their chemical nature, release the compounds for a few weeks up to over 100 days. Depending on the chemical nature and the biological stability of the therapeutic reagent, additional strategies for protein or other active ingredient stabilization may be employed.

[0287] The pharmaceutical compositions also may comprise suitable solid or gel phase carriers or excipients. Examples of such carriers or excipients include but are not limited to calcium carbonate, calcium phosphate, various sugars, starches, cellulose derivatives, gelatin, and polymers such as polyethylene glycols. Many of the active ingredients of the invention may be provided as salts with pharmaceutically compatible counter ions. Such pharmaceutically acceptable base addition salts are those salts which retain the biological effectiveness and properties of the free acids and which are obtained by reaction with inorganic or organic bases such as sodium hydroxide, magnesium hydroxide, ammonia, trialkylamine, dialkylamine, monoalkylamine, dibasic amino acids, sodium acetate, potassium benzoate, triethanol amine and the like.

[0288] The pharmaceutical composition of the invention may be in the form of a complex of the protein(s) or other active ingredient(s) of present invention along with protein or peptide antigens. The protein and/or peptide antigen will deliver a stimulatory signal to both B and T lymphocytes. B lymphocytes will respond to antigen through their surface immunoglobulin receptor. T lymphocytes will respond to antigen through the T cell receptor (TCR) following presentation of the antigen by MHC proteins. MHC and structurally related proteins including those encoded by class I and class II MHC genes on host cells will serve to present the peptide antigen(s) to T lymphocytes. The antigen components could also be supplied as purified MHC-peptide complexes alone or with co-stimulatory molecules that can directly signal T cells. Alternatively antibodies able to bind surface immunoglobulin and other molecules on B cells as well as antibodies able to bind the TCR and other molecules on T cells can be combined with the pharmaceutical composition of the invention.

[0289] The pharmaceutical composition of the invention may be in the form of a liposome in which protein of the present invention is combined, in addition to other pharmaceutically acceptable carriers, with amphipathic agents such as lipids which exist in aggregated form as micelles, insoluble monolayers, liquid crystals, or lamellar layers in aqueous solution. Suitable lipids for liposomal formulation include, without limitation, monoglycerides, diglycerides, sulfatides, lysolecithins, phospholipids, saponin, bile acids, and the like. Preparation of such liposomal formulations is within the level of skill in the art, as disclosed, for example, in U.S. Pat. Nos. 4,235,871; 4,501,728; 4,837,028; and 4,737,323, all of which are incorporated herein by reference.

[0290] The amount of protein or other active ingredient of the present invention in the pharmaceutical composition of the present invention will depend upon the nature and severity of the condition being treated, and on the nature of prior treatments which the patient has undergone. Ultimately, the attending physician will decide the amount of protein or other active ingredient of the present invention with which to treat each individual patient. Initially, the attending physician will administer low doses of protein or other active ingredient of the present invention and observe the patient's response. Larger doses of protein or other active ingredient of the present invention may be administered until the optimal therapeutic effect is obtained for the patient, and at that point the dosage is not increased further. It is contemplated that the various pharmaceutical compositions used to practice the method of the present invention should contain about 0.01 μg to about 100 mg (preferably about 0.1 μg to about 10 mg, more preferably about 0.1 μg to about 1 mg) of protein or other active ingredient of the present invention per kg body weight. For compositions of the present invention which are useful for bone, cartilage, tendon or ligament regeneration, the therapeutic method includes administering the composition topically, systematically, or locally as an implant or device. When administered, the therapeutic composition for use in this invention is, of course, in a pyrogen-free, physiologically acceptable form. Further, the composition may desirably be encapsulated or injected in a viscous form for delivery to the site of bone, cartilage or tissue damage. Topical administration may be suitable for wound healing and tissue repair. Therapeutically useful agents other than a protein or other active ingredient of the invention which may also optionally be included in the composition as described above, may alternatively or additionally, be administered simultaneously or sequentially with the composition in the methods of the invention. Preferably for bone and/or cartilage formation, the composition would include a matrix capable of delivering the protein-containing or other active ingredient-containing composition to the site of bone and/or cartilage damage, providing a structure for the developing bone and cartilage and optimally capable of being resorbed into the body. Such matrices may be formed of materials presently in use for other implanted medical applications.

[0291] The choice of matrix material is based on biocompatibility, biodegradability, mechanical properties, cosmetic appearance and interface properties. The particular application of the compositions will define the appropriate formulation. Potential matrices for the compositions may be biodegradable and chemically defined calcium sulfate, tricalcium phosphate, hydroxyapatite, polylactic acid, polyglycolic acid and polyanhydrides. Other potential materials are biodegradable and biologically well-defined, such as bone or dermal collagen. Further matrices are comprised of pure proteins or extracellular matrix components. Other potential matrices are nonbiodegradable and chemically defined, such as sintered hydroxyapatite, bioglass, aluminates, or other ceramics. Matrices may be comprised of combinations of any of the above mentioned types of material, such as polylactic acid and hydroxyapatite or collagen and tricalcium phosphate. The bioceramics may be altered in composition, such as in calcium-aluminate-phosphate and processing to alter pore size, particle size, particle shape, and biodegradability. Presently preferred is a 50:50 (mole weight) copolymer of lactic acid and glycolic acid in the form of porous particles having diameters ranging from 150 to 800 microns. In some applications, it will be useful to utilize a sequestering agent, such as carboxymethyl cellulose or autologous blood clot, to prevent the protein compositions from disassociating from the matrix.

[0292] A preferred family of sequestering agents is cellulosic materials such as alkylcelluloses (including hydroxyalkylcelluloses), including methylcellulose, ethylcellulose, hydroxyethylcellulose, hydroxypropylcellulose, hydroxypropyl-methylcellulose, and carboxymethylcellulose, the most preferred being cationic salts of carboxymethylcellulose (CMC). Other preferred sequestering agents include hyaluronic acid, sodium alginate, poly(ethylene glycol), polyoxyethylene oxide, carboxyvinyl polymer and poly(vinyl alcohol). The amount of sequestering agent useful herein is 0.5-20 wt %, preferably 1-10 wt % based on total formulation weight, which represents the amount necessary to prevent desorption of the protein from the polymer matrix and to provide appropriate handling of the composition, yet not so much that the progenitor cells are prevented from infiltrating the matrix, thereby providing the protein the opportunity to assist the osteogenic activity of the progenitor cells. In further compositions, proteins or other active ingredients of the invention may be combined with other agents beneficial to the treatment of the bone and/or cartilage defect, wound, or tissue in question. These agents include various growth factors such as epidermal growth factor (EGF), platelet derived growth factor (PDGF), transforming growth factors (TGF-α and TGF-β), and insulin-like growth factor (IGF).

[0293] The therapeutic compositions are also presently valuable for veterinary applications. Particularly domestic animals and thoroughbred horses, in addition to humans, are desired patients for such treatment with proteins or other active ingredients of the present invention. The dosage regimen of a protein-containing pharmaceutical composition to be used in tissue regeneration will be determined by the attending physician considering various factors which modify the action of the proteins, e.g., amount of tissue weight desired to be formed, the site of damage, the condition of the damaged tissue, the size of a wound, type of damaged tissue (e.g., bone), the patient's age, sex, and diet, the severity of any infection, time of administration and other clinical factors. The dosage may vary with the type of matrix used in the reconstitution and with inclusion of other proteins in the pharmaceutical composition. For example, the addition of other known growth factors, such as IGF I (insulin like growth factor I), to the final composition, may also effect the dosage. Progress can be monitored by periodic assessment of tissue/bone growth and/or repair, for example, X-rays, histomorphometric determinations and tetracycline labeling.

[0294] Polynucleotides of the present invention can also be used for gene therapy. Such polynucleotides can be introduced either in vivo or ex vivo into cells for expression in a mammalian subject. Polynucleotides of the invention may also be administered by other known methods for introduction of nucleic acid into a cell or organism (including, without limitation, in the form of viral vectors or naked DNA). Cells may also be cultured ex vivo in the presence of proteins of the present. invention in order to proliferate or to produce a desired effect on or activity in such cells. Treated cells can then be introduced in vivo for therapeutic purposes.

[0295] 4.9.3 Effective Dosage

[0296] Pharmaceutical compositions suitable for use in the present invention include compositions wherein the active ingredients are contained in an effective amount to achieve its intended purpose. More specifically, a therapeutically effective amount means an amount effective to prevent development of or to alleviate the existing symptoms of the subject being treated. Determination of the effective amount is well within the capability of those skilled in the art, especially in light of the detailed disclosure provided herein. For any compound used in the method of the invention, the therapeutically effective dose can be estimated initially from appropriate in vitro assays. For example, a dose can be formulated in animal models to achieve a circulating concentration range that can be used to more accurately determine useful doses in humans. For example, a dose can be formulated in animal models to achieve a circulating concentration range that includes the IC₅₀ as determined in cell culture (i.e., the concentration of the test compound which achieves a half-maximal inhibition of the protein's biological activity). Such information can be used to more accurately determine useful doses in humans.

[0297] A therapeutically effective dose refers to that amount of the compound that results in amelioration of symptoms or a prolongation of survival in a patient. Toxicity and therapeutic efficacy of such compounds can be determined by standard pharmaceutical procedures in cell cultures or experimental animals, e.g., for determining the LD₅₀ (the dose lethal to 50% of the population) and the ED₅₀ (the dose therapeutically effective in 50% of the population). The dose ratio between toxic and therapeutic effects is the therapeutic index and it can be expressed as the ratio between LD₅₀ and ED₅₀. Compounds which exhibit high therapeutic indices are preferred. The data obtained from these cell culture assays and animal studies can be used in formulating a range of dosage for use in human. The dosage of such compounds lies preferably within a range of circulating concentrations that include the ED₅₀ with little or no toxicity. The dosage may vary within this range depending upon the dosage form employed and the route of administration utilized. The exact formulation, route of administration and dosage can be chosen by the individual physician in view of the patient's condition. See, e.g., Fingl et al., 1975, in “The Pharmacological Basis of Therapeutics”, Ch. 1 p. 1. Dosage amount and interval may be adjusted individually to provide plasma levels of the active moiety which are sufficient to maintain the desired effects, or minimal effective concentration (MEC). The MEC will vary for each compound but can be estimated from in vitro data. Dosages necessary to achieve the MEC will depend on individual characteristics and route of administration. However, HPLC assays or bioassays can be used to determine plasma concentrations.

[0298] Dosage intervals can also be determined using MEC value. Compounds should be administered using a regimen which maintains plasma levels above the MEC for 10-90% of the time, preferably between 30-90% and most preferably between 50-90%. In cases of local administration or selective uptake, the effective local concentration of the drug may not be related to plasma concentration.

[0299] An exemplary dosage regimen for polypeptides or other compositions of the invention will be in the range of about 0.01 μg/kg to 100 mg/kg of body weight daily, with the preferred dose being about 0.1 μg/kg to 25 mg/kg of patient body weight daily, varying in adults and children. Dosing may be once daily, or equivalent doses may be delivered at longer or shorter intervals.

[0300] The amount of composition administered will, of course, be dependent on the subject being treated, on the subject's age and weight, the severity of the affliction, the manner of administration and the judgment of the prescribing physician.

[0301] 4.9.4 Packaging

[0302] The compositions may, if desired, be presented in a pack or dispenser device which may contain one or more unit dosage forms containing the active ingredient. The pack may, for example, comprise metal or plastic foil, such as a blister pack. The pack or dispenser device may be accompanied by instructions for administration. Compositions comprising a compound of the invention formulated in a compatible pharmaceutical carrier may also be prepared, placed in an appropriate container, and labeled for treatment of an indicated condition.

[0303] 4.10 Antibodies

[0304] Another aspect of the invention is an antibody that specifically binds the polypeptide of the invention. Such antibodies include monoclonal and polyclonal antibodies, single chain antibodies, chimeric antibodies, bifunctional/bispecific antibodies, humanized antibodies, human antibodies, and complementary determining region (CDR)-grafted antibodies, including compounds which include CDR and/or antigen-binding sequences, which specifically recognize a polypeptide of the invention. Preferred antibodies of the invention are human antibodies which are produced and identified according to methods described in WO93/11236, published Jun. 20, 1993, which is incorporated herein by reference in its entirety. Antibody fragments, including Fab, Fab′, F(ab′)₂, and Fᵥ, are also provided by the invention. The term “specific for” indicates that the variable regions of the antibodies of the invention recognize and bind polypeptides of the invention exclusively (i.e., able to distinguish the polypeptide of the invention from other similar polypeptides despite sequence identity, homology, or similarity found in the family of polypeptides), but may also interact with other proteins (for example, S. aureus protein A or other antibodies in ELISA techniques) through interactions with sequences outside the variable region of the antibodies, and in particular, in the constant region of the molecule. Screening assays to determine binding specificity of an antibody of the invention are well known and routinely practiced in the art. For a comprehensive discussion of such assays, see Harlow et al. (Eds), Antibodies A Laboratory Manual; Cold Spring Harbor Laboratory; Cold Spring Harbor, N.Y. (1988), Chapter 6. Antibodies that recognize and bind fragments of the polypeptides of the invention are also contemplated, provided that the antibodies are first and foremost specific for, as defined above, full length polypeptides of the invention. As with antibodies that are specific for full length polypeptides of the invention, antibodies of the invention that recognize fragments are those which can distinguish polypeptides from the same family of polypeptides despite inherent sequence identity, homology, or similarity found in the family of proteins. Antibodies of the invention can be produced using any method well known and routinely practiced in the art.

[0305] Non-human antibodies may be humanized by any methods known in the art. In one method, the non-human CDRs are inserted into a human antibody or consensus antibody framework sequence. Further changes can then be introduced into the antibody framework to modulate affinity or immunogenicity.

[0306] Antibodies of the invention are useful for, for example, therapeutic purposes (by modulating activity of a polypeptide of the invention), diagnostic purposes to detect or quantitate a polypeptide of the invention, as well as purification of a polypeptide of the invention. Kits comprising an antibody of the invention for any of the purposes described herein are also comprehended. In general, a kit of the invention also includes a control antigen for which the antibody is immunospecific. The invention further provides a hybridoma that produces an antibody according to the invention. Antibodies of the invention are useful for detection and/or purification of the polypeptides of the invention.

[0307] Polypeptides of the invention may also be used to immunize animals to obtain polyclonal and monoclonal antibodies which specifically react with the protein. Such antibodies may be obtained using either the entire protein or fragments thereof as an immunogen. The peptide immunogens additionally may contain a cysteine residue at the carboxyl terminus, and are conjugated to a hapten such as keyhole limpet hemocyanin (KLH). Methods for synthesizing such peptides are known in the art, for example, as in R. P. Merrifield, J. Amer. Chem. Soc. 85, 2149-2154 (1963); J. L. Krstenansky, et al., FEBS Lett. 211, 10 (1987).

[0308] Monoclonal antibodies binding to the protein of the invention may be useful diagnostic agents for the immunodetection of the protein. Neutralizing monoclonal antibodies binding to the protein may also be useful therapeutics for both conditions associated with the protein and also in the treatment of some forms of cancer where abnormal expression of the protein is involved. In the case of cancerous cells or leukemic cells, neutralizing monoclonal antibodies against the protein may be useful in detecting and preventing the metastatic spread of the cancerous cells, which may be mediated by the protein. In general, techniques for preparing polyclonal and monoclonal antibodies as well as hybridomas capable of producing the desired antibody are well known in the art (Campbell, A.M., Monoclonal Antibodies Technology: Laboratory Techniques in Biochemistry and Molecular Biology, Elsevier Science Publishers, Amsterdam, The Netherlands (1984); St. Groth et al., J. Immunol. 35:1-21 (1990); Kohler and Milstein, Nature 256:495-497 (19?75)), the trioma technique, the human B-cell hybridoma technique (Kozbor et al., Immunology Today 4:72 (1983); Cole et al., in Monoclonal Antibodies and Cancer Therapy, Alan R. Liss, Inc. (1985), pp. 77-96).

[0309] Any animal (mouse, rabbit, etc.) which is known to produce antibodies can be immunized with a peptide or polypeptide of the invention. Methods for immunization are well known in the art. Such methods include subcutaneous or intraperitoneal injection of the polypeptide. One skilled in the art will recognize that the amount of the protein encoded by the ORF of the present invention used for immunization will vary based on the animal which is immunized, the antigenicity of the peptide and the site of injection. The protein that is used as an immunogen may be modified or administered in an adjuvant in order to increase the protein's antigenicity. Methods of increasing the antigenicity of a protein are well known in the art and include, but are not limited to, coupling the antigen with a heterologous protein (such as globulin or -galactosidase) or through the inclusion of an adjuvant during immunization.

[0310] For monoclonal antibodies, spleen cells from the immunized animals are removed, fused with myeloma cells, such as SP2/0-Ag14 myeloma cells, and allowed to become monoclonal antibody producing hybridoma cells. Any one of a number of methods well known in the art can be used to identify the hybridoma cell which produces an antibody with the desired characteristics. These include screening the hybridomas with an ELISA assay, Western blot analysis, or radioimmunoassay (Lutz et al., Exp. Cell Research. 175:109-124 (1988)). Hybridomas secreting the desired antibodies are cloned and the class and subclass is determined using procedures known in the art (Campbell, A. M., Monoclonal Antibody Technology: Laboratory Techniques in Biochemistry and Molecular Biology, Elsevier Science Publishers, Amsterdam, The Netherlands (1984)). Techniques described for the production of single chain antibodies (U.S. Pat. No. 4,946,778) can be adapted to produce single chain antibodies to proteins of the present invention.

[0311] For polyclonal antibodies, antibody-containing antiserum is isolated from the immunized animal and is screened for the presence of antibodies with the desired specificity using one of the above-described procedures. The present invention further provides the above-described antibodies in delectably labeled form. Antibodies can be delectably labeled through the use of radioisotopes, affinity labels (such as biotin, avidin, etc.), enzymatic labels (such as horseradish peroxidase, alkaline phosphatase, etc.) fluorescent labels (such as FITC or rhodamine, etc.), paramagnetic atoms, etc. Procedures for accomplishing such labeling are well-known in the art, for example, see (Sternberger, L. A. et al., J. Histochem. Cytochem. 18:315 (1970); Bayer, E. A. et al., Meth. Enzym. 62:308 (1979); Engval, E. et al., Immunol. 109:129 (1972); Goding, J. W. J. Immunol. Meth. 13:215 (1976)).

[0312] The labeled antibodies of the present invention can be used for in vitro, in vivo, and in situ assays to identify cells or tissues in which a fragment of the polypeptide of interest is expressed. The antibodies may also be used directly in therapies or other diagnostics. The present invention further provides the above-described antibodies immobilized on a solid support. Examples of such solid supports include plastics such as polycarbonate, complex carbohydrates such as agarose and Sepharose®, acrylic resins and such as polyacrylamide and latex beads. Techniques for coupling antibodies to such solid supports are well known in the art (Weir, D. M. et al., “Handbook of Experimental Immunology” 4th Ed., Blackwell Scientific Publications, Oxford, England, Chapter 10 (1986); Jacoby, W. D. et al., Meth. Enzym. 34 Academic Press, N.Y. (1974)). The immobilized antibodies of the present invention can be used for in vitro, in vivo, and in situ assays as well as for immuno-affinity purification of the proteins of the present invention.

[0313] 4.11 Computer Readable Sequences

[0314] In one application of this embodiment, a nucleotide sequence of the present invention can be recorded on computer readable media. As used herein, “computer readable media” refers to any medium which can be read and accessed directly by a computer. Such media include, but are not limited to: magnetic storage media, such as floppy discs, hard disc storage medium, and magnetic tape; optical storage media such as CD-ROM; electrical storage media such as RAM and ROM; and hybrids of these categories such as magnetic/optical storage media. A skilled artisan can readily appreciate how any of the presently known computer readable mediums can be used to create a manufacture comprising computer readable medium having recorded thereon a nucleotide sequence of the present invention. As used herein, “recorded” refers to a process for storing information on computer readable medium. A skilled artisan can readily adopt any of the presently known methods for recording information on computer readable medium to generate manufactures comprising the nucleotide sequence information of the present invention.

[0315] A variety of data storage structures are available to a skilled artisan for creating a computer readable medium having recorded thereon a nucleotide sequence of the present invention. The choice of the data storage structure will generally be based on the means chosen to access the stored information. In addition, a variety of data processor programs and formats can be used to store the nucleotide sequence information of the present invention on computer readable medium. The sequence information can be represented in a word processing text file, formatted in commercially-available software such as WordPerfect and Microsoft Word, or represented in the form of an ASCII file, stored in a database application, such as DB2, Sybase, Oracle, or the like. A skilled artisan can readily adapt any number of data processor structuring formats (e.g. text file or database) in order to obtain computer readable medium having recorded thereon the nucleotide sequence information of the present invention.

[0316] By providing any of the nucleotide sequences SEQ ID NOs: 1-108 or a representative fragment thereof; or a nucleotide sequence at least 95% identical to any of the nucleotide sequences of the SEQ ID NOs: 1-108 in computer readable form, a skilled artisan can routinely access the sequence information for a variety of purposes. Computer software is publicly available which allows a skilled artisan to access sequence information provided in a computer readable medium. The examples which follow demonstrate how software which implements the BLAST (Altschul et al., J. Mol. Biol. 215:403-410 (1990)) and BLAZE (Brutlag et al., Comp. Chem; 17:203-207 (1993)) search algorithms on a Sybase system is used to identify open. reading frames (ORFs) within a nucleic acid sequence. Such ORFs may be protein encoding fragments and may be useful in producing commercially important proteins such as enzymes used in fermentation reactions and in the production of commercially useful metabolites.

[0317] As used herein, “a computer-based system” refers to the hardware means, software means, and data storage means used to analyze the nucleotide sequence information of the present invention. The minimum hardware means of the computer-based systems of the present invention comprises a central processing unit (CPU), input means, output means, and data storage means. A skilled artisan can readily appreciate that any one of the currently available computer-based systems are suitable for use in the present invention. As stated above, the computer-based systems of the present invention comprise a data storage means having stored therein a nucleotide sequence of the present invention and the necessary hardware means and software means for supporting and implementing a search means. As used herein, “data storage means” refers to memory which can store nucleotide sequence information of the present invention, or a memory access means which can access manufactures having recorded thereon the nucleotide sequence information of the present invention.

[0318] As used herein, “search means” refers to one or more programs which are implemented on the computer-based system to compare a target sequence or target structural motif with the sequence information stored within the data storage means. Search means are used to identify fragments or regions of a known sequence which match a particular target sequence or target motif. A variety of known algorithms are disclosed publicly and a variety of commercially available software for conducting search means are and can be used in the computer-based systems of the present invention. Examples of such software includes, but is not limited to, Smith-Waterman, MacPattern (EMBL), BLASTN and BLASTA (NPOLYPEPTIDEIA). A skilled artisan can readily recognize that any one of the available algorithms or implementing software packages for conducting homology searches can be adapted for use in the present computer-based systems. As used herein, a “target sequence” can be any nucleic acid or amino acid sequence of six or more nucleotides or two or more amino acids. A skilled artisan can readily recognize that the longer a target sequence is, the less likely a target sequence will be present as a random occurrence in the database. The most preferred sequence length of a target sequence is from about 10 to 100 amino acids, or from about 30 to 300 nucleotide residues. However, it is well recognized that searches for commercially important fragments, such as sequence fragments involved in gene expression and protein processing, may be of shorter length.

[0319] As used herein, “a target structural motif,” or “target motif,” refers to any rationally selected sequence or combination of sequences in which the sequence(s) are chosen based on a three-dimensional configuration which is formed upon the folding of the target motif. There are a variety of target motifs known in the art. Protein target motifs include, but are not limited to, enzyme active sites and signal sequences. Nucleic acid target motifs include, but are not limited to, promoter sequences, hairpin structures and inducible expression elements (protein binding sequences).

[0320] 4.12 Triple Helix Formation

[0321] In addition, the fragments of the present invention, as broadly described, can be used to control gene expression through triple helix formation or antisense DNA or RNA, both of which methods are based on the binding of a polynucleotide sequence to DNA or RNA. Polynucleotides suitable for use in these methods are preferably 20 to 40 bases in length and are designed to be complementary to a region of the gene involved in transcription (triple helix—see Lee et al., Nucl. Acids Res. 6:3073 (1979); Cooney et al., Science 15241:456 (1988); and Dervan et al., Science 251:1360 (1991)) or to the mRNA itself (antisense—Olmno, J. Neurochem. 56:560 (1991); Oligodeoxynucleotides as Antisense Inhibitors of Gene Expression, CRC Press, Boca Raton, Fla. (1988)). Triple helix-formation optimally results in a shut-off of RNA transcription from DNA, while antisense RNA hybridization blocks translation of an mRNA molecule into polypeptide. Both techniques have been demonstrated to be effective in model systems. Information contained in the sequences of the present invention is necessary for the design of an antisense or triple helix oligonucleotide.

[0322] 4.13 Diagnostic Assays and Kits

[0323] The present invention further provides method's to identify the presence or expression of one of the ORFs of the present invention, or homolog thereof, in a test sample, using a nucleic acid probe or antibodies of the present invention, optionally conjugated or otherwise associated with a suitable label.

[0324] In general, methods for detecting a polynucleotide of the invention can comprise contacting a sample with a compound that binds to and forms a complex with the polynucleotide for a period sufficient to form the complex, and detecting the complex, so that if a complex is detected, a polynucleotide of the invention is detected in the sample. Such methods can also comprise contacting a sample under stringent hybridization conditions with nucleic acid primers that anneal to a polynucleotide of the invention under such conditions, and amplifying annealed polynucleotides, so that if a polynucleotide is amplified, a polynucleotide of the invention is detected in the sample.

[0325] In general, methods for detecting a polypeptide of the invention can comprise contacting a sample with a compound that binds to and forms a complex with the polypeptide for a period sufficient to form the complex, and detecting the complex, so that if a complex is detected, a polypeptide of the invention is detected in the sample.

[0326] In detail, such methods comprise incubating a test sample with one or more of the antibodies or one or more of the nucleic acid probes of the present invention and assaying for binding of the nucleic acid probes or antibodies to components within the test sample.

[0327] Conditions for incubating a nucleic acid probe or antibody with a test sample vary. Incubation conditions depend on the format employed in the assay, the detection methods employed, and the type and nature of the nucleic acid probe or antibody used in the assay. One skilled in the art will recognize that any one of the commonly available hybridization, amplification or immunological assay formats can readily be adapted to employ the nucleic acid probes or antibodies of the present invention. Examples of such assays can be found in Chard, T., An Introduction to Radioimmunoassay and Related Techniques, Elsevier Science Publishers, Amsterdam, The Netherlands (1986); Bullock, G. R. et al., Techniques in Immunocytochemistry, Academic Press, Orlando, Fla. Vol. 1 (1982), Vol. 2 (1983), Vol. 3 (1985); Tijssen, P., Practice and Theory of immunoassays: Laboratory Techniques in Biochemistry and Molecular Biology, Elsevier Science Publishers, Amsterdam, The Netherlands (1985). The test samples of the present invention include cells, protein or membrane extracts of cells, or biological fluids such as sputum, blood, serum, plasma, or urine. The test sample used in the above-described method will vary based on the assay format, nature of the detection method and the tissues, cells or extracts used as the sample to be assayed Methods for preparing protein extracts or membrane extracts of cells are well known in the art and can be readily be adapted in order to obtain a sample which is compatible with the system utilized.

[0328] In another embodiment of the present invention, kits are provided which contain the necessary reagents to carry out the assays of the present invention. Specifically, the invention provides a compartment kit to receive, in close confinement, one or more containers which comprises: (a) a first container comprising one of the probes or antibodies of the present invention; and (b) one or more other containers comprising one or more of the following: wash reagents, reagents capable of detecting presence of a bound probe or antibody.

[0329] In detail, a compartment kit includes any kit in which reagents are contained in separate containers. Such containers include small glass containers, plastic containers or strips of plastic or paper. Such containers allows one to efficiently transfer reagents from one compartment to another compartment such that the samples and reagents are not cross-contaminated, and the agents or solutions of each container can be added in a quantitative fashion from one compartment to another. Such containers will include a container which will accept the test sample, a container which contains the antibodies used in the assay, containers which contain wash reagents (such as phosphate buffered saline, Tris-buffers, etc.), and containers which contain the reagents used to detect the bound antibody or probe. Types of detection reagents include labeled nucleic acid probes, labeled secondary antibodies, or in the alternative, if the primary antibody is labeled, the enzymatic, or antibody binding reagents which are capable of reacting with the labeled antibody. One skilled in the art will readily recognize that the disclosed probes and antibodies of the present invention can be readily incorporated into one of the established kit formats which are well known in the art.

[0330] 4.14 Medical Imaging

[0331] The novel polypeptides and binding partners of the invention are useful in medical imaging of sites expressing the molecules of the invention (e.g., where the polypeptide of the invention is involved in the immune response, for imaging sites of inflammation or infection). See, e.g., Kunkel et al., U.S. Pat. No. 5,413,778. Such methods involve chemical attachment of a labeling or imaging agent, administration of the labeled polypeptide to a subject in a pharmaceutically acceptable carrier, and imaging the labeled polypeptide in vivo at the target site.

[0332] 4.15 Screening Assays

[0333] Using the isolated proteins and polynucleotides of the invention, the present invention further provides methods of obtaining and identifying agents which bind to a polypeptide encoded by an ORF corresponding to any of the nucleotide sequences set forth in the SEQ ID NOs: 1-108, or bind to a specific domain of the polypeptide encoded by the nucleic acid. In detail, said method comprises the steps of:

[0334] (a) contacting an agent with an isolated protein encoded by an ORF of the present invention, or nucleic acid of the invention; and

[0335] (b) determining whether the agent binds to said protein or said nucleic acid.

[0336] In general, therefore, such methods for identifying compounds that bind to a polynucleotide of the invention can comprise contacting a compound with a polynucleotide of the invention for a time sufficient to form a polynucleotide/compound complex, and detecting the complex, so that if a polynucleotide/compound complex is detected, a compound that binds to a polynucleotide of the invention is identified.

[0337] Likewise, in general, therefore, such methods for identifying compounds that bind to a polypeptide of the invention can comprise contacting a compound with a polypeptide of the invention for a time sufficient to form a polypeptide/compound complex, and detecting the complex, so that if a polypeptide/compound complex is detected, a compound that binds to a polynucleotide of the invention is identified.

[0338] Methods for identifying compounds that bind to a polypeptide of the invention can also comprise contacting a compound with a polypeptide of the invention in a cell for a time sufficient to form a polypeptide/compound complex, wherein the complex drives expression of a receptor gene sequence in the cell, and detecting the complex by detecting reporter gene sequence expression, so that if a polypeptide/compound complex is detected, a compound that binds a polypeptide of the invention is identified.

[0339] Compounds identified via such methods can include compounds which modulate the activity of a polypeptide of the invention (that is, increase or decrease its activity, relative to activity observed in the absence of the compound). Alternatively, compounds identified via such methods can include compounds which modulate the expression of a polynucleotide of the invention (that is, increase or decrease expression relative to expression levels observed in the absence of the compound). Compounds, such as compounds identified via the methods of the invention, can be tested using standard assays well known to those of skill in the art for their ability to modulate activity/expression.

[0340] The agents screened in the above assay can be, but are not limited to, peptides, carbohydrates, vitamin derivatives, or other pharmaceutical agents. The agents can be selected and screened at random or rationally selected or designed using protein modeling techniques.

[0341] For random screening, agents such as peptides, carbohydrates, pharmaceutical agents and the like are selected at random and are assayed for their ability to bind to the protein encoded by the ORF of the present invention. Alternatively, agents may be rationally selected or designed. As used herein, an agent is said to be “rationally selected or designed” when the agent is chosen based on the configuration of the particular protein. For example, one skilled in the art can readily adapt currently available procedures to generate peptides, pharmaceutical agents and the like, capable of binding to a specific peptide sequence, in order to generate rationally designed antipeptide peptides, for example see Hurby et al., Application of Synthetic Peptides: Antisense Peptides,” In Synthetic Peptides, A User's Guide, W. H. Freeman, NY (1992), pp. 289-307, and Kaspczak et al., Biochemistry 28:9230-8 (1989), or pharmaceutical agents, or the like.

[0342] In addition to the foregoing, one class of agents of the present invention, as broadly described, can be used to control gene expression through binding to one of the ORFs or EMFs of the present invention. As described above, such agents can be randomly screened or rationally designed/selected. Targeting the ORF or EMF allows a skilled artisan to design sequence specific or element specific agents, modulating the expression of either a single ORF or multiple ORFs which rely on the same EMF for expression control. One class of DNA binding agents are agents which contain base residues which hybridize or form a triple helix formation by binding to DNA or RNA. Such agents can be based on the classic phosphodiester, ribonucleic acid backbone, or can be a variety of sulfhydryl or polymeric derivatives which have base attachment capacity.

[0343] Agents suitable for use in these methods preferably contain 20 to 40 bases and are designed to be complementary to a region of the gene involved in transcription (triple helix—see Lee et al., Nucl. Acids Res. 6:3073 (1979); Cooney et al., Science 241:456 (1988); and Dervan et al., Science 251:1360 (1991)) or to the mRNA itself (antisense—Okano, J. Neurochem. 56:560 (1991); Oligodeoxynucleotides as Antisense Inhibitors of Gene Expression, CRC Press, Boca Raton, Fla. (1988)). Triple helix-formation optimally results in a shut-off of RNA transcription from DNA, while antisense RNA hybridization blocks translation of an mRNA molecule into polypeptide. Both techniques have been demonstrated to be effective in model systems. Information contained in the sequences of the present invention is necessary for the design of an antisense or triple helix oligonucleotide and other DNA binding agents.

[0344] Agents which bind to a protein encoded by one of the ORFs of the present invention can be used as a diagnostic agent. Agents which bind to a protein encoded by one of the ORFs of the present invention can be formulated using known techniques to generate a pharmaceutical composition.

[0345] 4.16 Use of Nucleic Acids as Probes

[0346] Another aspect of the subject invention is to provide for polypeptide-specific nucleic acid hybridization probes capable of hybridizing with naturally occurring nucleotide sequences. The hybridization probes of the subject invention may be derived from any of the nucleotide sequences SEQ ID NOs: 1-108. Because the corresponding gene is only expressed in a limited number of tissues, a hybridization probe derived from of any of the nucleotide sequences SEQ ID NOs: 1-108 can be used as an indicator of the presence of RNA of cell type of such a tissue in a sample.

[0347] Any suitable hybridization technique can be employed, such as, for example, in situ hybridization. PCR as described in U.S. Pat. Nos. 4,683,195 and 4,965,188 provides additional uses for oligonucleotides based upon the nucleotide sequences. Such probes used in PCR may be of recombinant origin, may be chemically synthesized, or a mixture of both. The probe will comprise a discrete nucleotide sequence for the detection of identical sequences or a degenerate pool of possible sequences for identification of closely related genomic sequences.

[0348] Other means for producing specific hybridization probes for nucleic acids include the cloning of nucleic acid sequences into vectors for the production of mRNA probes. Such vectors are known in the art and are commercially available and may be used to synthesize RNA probes in vitro by means of the addition of the appropriate RNA polymerase as 17 or SP6 RNA polymerase and the appropriate radioactively labeled nucleotides. The nucleotide sequences may be used to construct hybridization probes for mapping their respective genomic sequences. The nucleotide sequence provided herein may be mapped to a chromosome or specific regions of a chromosome using well known genetic and/or chromosomal mapping techniques. These techniques include in situ hybridization, linkage analysis against known chromosomal markers, hybridization screening with libraries or flow-sorted chromosomal preparations specific to known chromosomes, and the like. The technique of fluorescent in situ hybridization of chromosome spreads has been described, among other places, in Verma et al (1988) Human Chromosomes: A Manual of Basic Techniques, Pergamon Press, New York N.Y.

[0349] Fluorescent in situ hybridization of chromosomal preparations and other physical chromosome mapping techniques may be correlated with additional genetic map data. Examples of genetic map data can be found in the 1994 Genome Issue of Science (265:1981f). Correlation between the location of a nucleic acid on a physical chromosomal map and a specific disease (or predisposition to a specific disease) may help delimit the region of DNA associated with that genetic disease. The nucleotide sequences of the subject invention may be used to detect differences in gene sequences between normal, carrier or affected individuals.

[0350] 4.17 Preparation of Support Bound Oligonucleotides

[0351] Oligonucleotides, i.e., small nucleic acid segments, may be readily prepared by, for example, directly synthesizing the oligonucleotide by chemical means, as is commonly practiced using an automated oligonucleotide synthesizer.

[0352] Support bound oligonucleotides may be prepared by any of the methods known to those of skill in the art using any suitable support such as glass, polystyrene or Teflon. One strategy is to precisely spot oligonucleotides synthesized by standard synthesizers. Immobilization can be achieved using passive adsorption (Inouye & Hondo, (1990) J. Clin. Microbiol. 28(6) 1469-72); using UV light (Nagata et al., 1985; Dahlen et al., 1987; Morrissey & Collins, (1989) Mol. Cell Probes 3(2) 189-207) or by covalent binding of base modified DNA (Keller et al., 1988; 1989); all references being specifically incorporated herein.

[0353] Another strategy that may be employed is the use of the strong biotin-streptavidin interaction as a linker. For example, Broude et al. (1994) Proc. Natl. Acad. Sci. USA 91(8) 3072-6, describe the use of biotinylated probes, although these are duplex probes, that are immobilized on streptavidin-coated magnetic beads. Streptavidin-coated beads may be purchased from Dynal, Oslo. Of course, this same linking chemistry is applicable to coating any surface with streptavidin. Biotinylated probes may be purchased from various sources, such as, e.g., Operon Technologies (Alameda, Calif.).

[0354] Nunc Laboratories (Naperville, Ill.) is also selling suitable material that could be used. Nunc Laboratories have developed a method by which DNA can be covalently bound to the microwell surface termed Covalink NH. CovaLink NH is a polystyrene surface grafted with secondary amino groups (>NH) that serve as bridge-heads for further covalent coupling. CovaLink Modules may be purchased from Nunc Laboratories. DNA molecules may be bound to CovaLink exclusively at the 5′-end by a phosphoramidate bond, allowing immobilization of more than 1 pmol of DNA (Rasmussen et al., (1991 Anal. Biochem. 198(1) 13842).

[0355] The use of CovaLink NH strips for covalent binding of DNA molecules at the 5′-end has been described (Rasmussen et al., (1991) Anal. Biochem. 198(1) 138-42). In this technology, a phosphoramidate bond is employed (Chu et al., (1983) Nucleic Acids Res. 11(8) 6513-29). This is beneficial as immobilization using only a single covalent bond is preferred. The phosphoramidate bond joins the DNA to the CovaLink NH secondary amino groups that are positioned at the end of spacer arms covalently grafted onto the polystyrene surface through a 2 nm long spacer arm. To link an oligonucleotide to CovaLink NH via an phosphoramidate bond, the oligonucleotide terminus must have a 5′-end phosphate group. It is, perhaps, even possible for biotin to be covalently bound to CovaLink and then streptavidin used to bind the probes.

[0356] More specifically, the linkage method includes dissolving DNA in water (7.5 ng/ul) and denaturing for 10 min. at 95° C. and cooling on ice for 10 min. Ice-cold 0.1 M 1-methylimidazole, pH 7.0 (1-MeIm7), is then added to a final concentration of 10 mM 1-MeIn7. A ss DNA solution is then dispensed into CovaLink NH strips (75 ul/well) standing on ice.

[0357] Carbodiimide 0.2 M 1-ethyl-3-(3-dimethylaminopropyl)-carbodiimide (EDC), dissolved in 10 mM 1-MeIm₇, is made fresh and 25 ul added per well. The strips are incubated for 5 hours at 50° C. After incubation the strips are washed using, e.g., Nunc-Immuno Wash; first the wells are washed 3 times, then they are soaked with washing solution for 5 min., and finally they are washed 3 times (where in the washing solution is 0.4 N NaOH, 0.25% SDS heated to 50° C.).

[0358] It is contemplated that a further suitable method for use with the present invention is that described in PCT Patent Application WO 90/03382 (Southern & Maskos), incorporated herein by reference. This method of preparing an oligonucleotide bound to a support involves attaching a nucleoside 3′-reagent through the phosphate group by a covalent phosphodiester link to aliphatic hydroxyl groups carried by the support. The oligonucleotide is then synthesized on the supported nucleoside and protecting groups removed from the synthetic oligonucleotide chain under standard conditions that do not cleave the oligonucleotide from the support. Suitable reagents include nucleoside phosphoramidite and nucleoside hydrogen phosphorate.

[0359] An on-chip strategy for the preparation of DNA probe for the preparation of DNA probe arrays may be employed. For example, addressable laser-activated photodeprotection may be employed in the chemical synthesis of oligonucleotides directly on a glass surface, as described by Fodor et al. (1991) Science 251(4995) 767-73, incorporated herein by reference. Probes may also be immobilized on nylon supports as described by Van Ness et al. (1991) Nucleic Acids Res. 19(12) 3345-50; or linked to Teflon using the method of Duncan & Cavalier (1988) Anal. Biochem. 169(1) 104-8; all references being specifically incorporated herein.

[0360] To link an oligonucleotide to a nylon support, as described by Van Ness et al. (1991), requires activation of the nylon surface via alkylation and selective activation of the 5′-amine of oligonucleotides with cyanuric chloride.

[0361] One particular way to prepare support bound oligonucleotides is to utilize the light-generated synthesis described by Pease et al., (1994) PNAS USA 91(11) 5022-6, incorporated herein by reference). These authors used current photolithographic techniques to generate arrays of immobilized oligonucleotide probes (DNA chips). These methods, in which light is used to direct the synthesis of oligonucleotide probes in high-density, miniaturized arrays, utilize photolabile 5′-protected N-acyl-deoxynucleoside phosphoramidites, surface linker chemistry and versatile combinatorial synthesis strategies. A matrix of 256 spatially defined oligonucleotide probes may be generated in this manner.

[0362] 4.18 Preparation of Nucleic Acid Fragments

[0363] The nucleic acids may be obtained from any appropriate source, such as cDNAs, genomic DNA, chromosomal DNA, microdissected chromosome bands, cosmid or YAC inserts, and RNA, including mRNA without any amplification steps. For example, Sambrook et al. (1989) describes three protocols for the isolation of high molecular weight DNA from mammalian cells (p. 9.14-9.23).

[0364] DNA fragments may be prepared as clones in M13, plasmid or lambda vectors and/or prepared directly from genomic DNA or cDNA by PCR or other amplification methods. Samples may be prepared or dispensed in multiwell plates. About 100-1000 ng of DNA samples may be prepared in 2-500 ml of final volume.

[0365] The nucleic acids would then be fragmented by any of the methods known to those of skill in the art including, for example, using restriction enzymes as described at 9.24-9.28 of Sambrook et al. (1989), shearing by ultrasound and NaOH treatment.

[0366] Low pressure shearing is also appropriate, as described by Schriefer et al. (1990) Nucleic Acids Res. 18(24) 7455-6, incorporated herein by reference). In this method, DNA samples are passed through a small French pressure cell at a variety of low to intermediate pressures. A lever device allows controlled application of low to intermediate pressures to the cell. The results of these studies indicate that low-pressure shearing is a useful alternative to sonic and enzymatic DNA fragmentation methods.

[0367] One particularly suitable way for fragmenting DNA is contemplated to be that using the two base recognition endonuclease, CviJI, described by Fitzgerald et al. (1992) Nucleic Acids Res. 20(14) 3753-62. These authors described an approach for the rapid fragmentation and fractionation of DNA into particular sizes that they contemplated to be suitable for shotgun cloning and sequencing.

[0368] The restriction endonuclease CviJI normally cleaves the recognition sequence PuGCPy between the G and C to leave blunt ends. Atypical reaction conditions, which alter the specificity of this enzyme (CviJI**), yield a quasi-random distribution of DNA fragments form the small molecule pUC19 (2688 base pairs). Fitzgerald et al. (1992) quantitatively evaluated the randomness of this fragmentation strategy, using a CviJI** digest of pUC19 that was size fractionated by a rapid gel filtration method and directly ligated, without end repair, to a lac Z minus M13 cloning vector. Sequence analysis of 76 clones showed that CviJI** restricts pyGCPy and PuGCPu, in addition to PuGCPy sites, and that new sequence data is accumulated at a rate consistent with random fragmentation.

[0369] As reported in the literature, advantages of this approach compared to sonication and agarose gel fractionation include: smaller amounts of DNA are required (0.2-0.5 ug instead of 2-5 ug); and fewer steps are involved (no preligation, end repair, chemical extraction, or agarose gel electrophoresis and elution are needed

[0370] Irrespective of the manner in which the nucleic acid fragments are obtained or prepared, it is important to denature the DNA to give single stranded pieces available for hybridization. This is achieved by incubating the DNA solution for 2-5 minutes at 80-90° C. The solution is then cooled quickly to 2° C. to prevent renaturation of the DNA fragments before they are contacted with the chip. Phosphate groups must also be removed from genomic DNA by methods known in the art.

[0371] 4.19 Preparation of DNA Arrays

[0372] Arrays may be prepared by spotting DNA samples on a support such as a nylon membrane. Spotting may be performed by using arrays of metal pins (the positions of which correspond to an array of wells in a microtiter plate) to repeated by transfer of about 20 nl of a DNA solution to a nylon membrane. By offset printing, a density of dots higher than the density of the wells is achieved. One to 25 dots may be accommodated in 1 mm², depending on the type of label used. By avoiding spotting in some preselected number of rows and columns, separate subsets (subarrays) may be formed. Samples in one subarray may be the same genomic segment of DNA (or the same gene) from different individuals, or may be different, overlapped genomic clones. Each of the subarrays may represent replica spotting of the same samples. In one example, a selected gene segment may be amplified from 64 patients. For each patient, the amplified gene segment may be in one 96-well plate (all 96 wells containing the same sample). A plate for each of the 64 patients is prepared. By using a 96-pin device, all samples may be spotted on one 8×12 cm membrane. Subarrays may contain 64 samples, one from each patient. Where the 96 subarrays are identical, the dot span may be 1 mm² and there may be a 1 mm space between subarrays.

[0373] Another approach is to use membranes or plates (available from NUNC, Naperville, Ill.) which may be partitioned by physical spacers e.g. a plastic grid molded over the membrane, the grid being similar to the sort of membrane applied to the bottom of multiwell plates, or hydrophobic strips. A fixed physical spacer is not preferred for imaging by exposure to flat phosphor-storage screens or x-ray films.

[0374] The present invention is illustrated in the following examples. Upon consideration of the present disclosure, one of skill in the art will appreciate that many other embodiments and variations may be made in the scope of the present invention. Accordingly, it is intended that the broader aspects of the present invention not be limited to the disclosure of the following examples. The present invention is not to be limited in scope by the exemplified embodiments which are intended as illustrations of single aspects of the invention, and compositions and methods which are functionally equivalent are within the scope of the invention. Indeed, numerous modifications and variations in the practice of the invention are expected to occur to those skilled in the art upon consideration of the present preferred embodiments. Consequently, the only limitations which should be placed upon the scope of the invention are those which appear in the appended claims.

[0375] All references cited within the body of the instant specification are hereby incorporated by reference in their entirety.

### 5.0 EXAMPLES

### 5.1 Example 1

[0376] Novel Nucleic Acid Sequences Obtained From Various Libraries

[0377] A plurality of novel nucleic acids were obtained from cDNA libraries prepared from various human tissues and in some cases isolated from a genomic library derived from human chromosome using standard PCR, SBH sequence signature analysis and Sanger sequencing techniques. The inserts of the library were amplified with PCR using primers specific for the vector sequences which flank the inserts. Clones from cDNA libraries were spotted on nylon membrane filters and screened with oligonucleotide probes (e.g., 7-mers) to obtain signature sequences. The clones were clustered into groups of similar or identical sequences. Representative clones were selected for sequencing.

[0378] In some cases, the 5′ sequence of the amplified inserts was then deduced using a typical Sanger sequencing protocol. PCR products were purified and subjected to fluorescent dye terminator cycle sequencing. Single pass gel sequencing was done using a 377 Applied Biosystems (ABI) sequencer to obtain the novel nucleic acid sequences. In some cases RACE (Random Amplification of cDNA Ends) was performed to further extend the sequence in the 5′ direction.

### 5.2 Example 2

[0379] Novel Nucleic Acids

[0380] The novel nucleic acids of the present invention of the invention were assembled from sequences that were obtained from a cDNA library by methods described in Example 1 above, and in some cases sequences obtained from one or more public databases. The nucleic acids were assembled using an EST sequence as a seed. Then a recursive algorithm was used to extend the seed EST into an extended assemblage, by pulling additional sequences from different databases (i.e., Hyseq's database containing EST sequences, dbEST version 114, gb pri 114, and UniGene version 101) that belong to this assemblage. The algorithm terminated when there was no additional sequences from the above databases that would extend the assemblage. Inclusion of component sequences into the assemblage was based on a BLASTN hit to the extending assemblage with BLAST score greater than 300 and percent identity greater than 95%.

[0381] Using PHRAP (Univ. of Washington) or CAP4 (Paracel), a full length gene cDNA sequence and its corresponding protein sequence were generated from the assemblage. Any frame shifts and incorrect stop codons were corrected by hand editing. During editing, the sequence was checked using FASTY and/or BLAST against Genbank (i.e., dbEST version 117, gb pri 117, UniGene version 117, Genpept release 117). Other computer programs which may have been used in the editing process were phredPhrap and Consed (University of Washington) and ed-ready, ed-ext and gc-zip-2 (Hyseq, Inc.). The full-length nucleotide and amino acid sequences, including splice variants resulting from these procedures are shown in the Sequence Listing as SEQ ID NOS: 1-108.

[0382] Table 1 shows the various tissue sources of SEQ ID NO: 1-108.

[0383] The nearest neighbor results for SEQ ID NO: 1-108 were obtained by a BLASTP version 2.0al 19 MP-WashU search against Genpept release 117, using BLAST algorithm. The nearest neighbor result showed the closest homologue for SEQ ID NO: 1-108 from Genpept (and contains the translated amino acid sequences for which the nucleic acid sequence encodes). The nearest neighbor results for SEQ ID No: 1-108 are shown in Table 2 below:

TABLE 1

| | | HYSEQ | |
|---|---|---|---|
| TISSUE | RNA | LIBRARY | |
| ORIGIN | SOURCE | NAME | SEQ ID NOS: |
| adult brain | GIBCO | AB3001 | 14 19 39-40 46 56- |
| | | | 59 91 94 105 |
| adult brain | GIBCO | ABD003 | 7 13 16 2128 31- |
| | | | 32 40-42 47 50 65 |
| | | | 72 76 79 97 100- |
| | | | 101 105 107 |
| adult brain | Clontech | ABR001 | 13 36 56 66 77 79 |
| | | | 90 |
| adult brain | Clontech | ABR006 | 7 15 21 48 75 77 |
| | | | 92 |
| adult brain | Clontech | ABR008 | 1-3 6-8 10 13-14 |
| | | | 19-20 22-26 29-30 |
| | | | 35 39-41 44 46 50 |
| | | | 53-58 63 66 68-69 |
| | | | 72-73 75-79 84-85 |
| | | | 87 90-91 97 99-101 |
| | | | 104-107 |
| adult brain | BioChain | ABR012 | 59 73 99 |
| adult brain | Invitrogen | ABR014 | 9 31-32 40 107 |
| adult brain | Invitrogen | ABR015 | 13 40 |
| adult brain | Invitrogen | ABR016 | 40 |
| adult brain | Invitrogen | ABT004 | 6 13 15 22 24 41 |
| | | | 55 59 76 85 87 105 |
| adipocytes | Stratagene | ADP001 | 12 14 16 21 31-32 |
| | | | 40-41 52 59 88 90 |
| adrenal gland | Clontech | ADR002 | 1-2 5 7 31-32 39 |
| | | | 41 56-59 75 77-78 |
| adult heart | GIBCO | ARR001 | 1-2 4 7 12 21 30- |
| | | | 33 40-41 46 52-59 |
| | | | 66 72-74 77-79 90- |
| | | | 91 94 97-98 100- |
| | | | 101 105 |
| adult kidney | GIBCO | AKD001 | 1-2 7 9 12 14-16 |
| | | | 2130-33 3640-41 |
| | | | 44 46-48 50-51 53 |
| | | | 55-59 68-70 72 74 |
| | | | 76-79 81 84-85 87 |
| | | | 91-92 94 97 99-101 |
| | | | 104-105 |
| adult kidney | Invitrogen | AKT002 | 1 7 12 15 21 30-33 |
| | | | 40-43 50 52 54 56 |
| | | | 59 61 66 73 76 79- |
| | | | 80 87 92 105 |
| adult lung | GIBCO | ALG001 | 3 7 16 40 50 68-69 |
| | | | 79 100-101 |
| lymph node | Clontech | ALN001 | 21 26 31-32 40 56 |
| | | | 108 |
| young liver | GIBCO | ALV001 | 1 4 9 20 31-32 40 |
| | | | 41 48 50 52 56 59 |
| | | | 66 76 79 85 92 99 |
| adult liver | Invitrogen | ALV002 | 3 21 35 39 44 47- |
| | | | 48 50-51 60 74 76 |
| | | | 78 84 91-92 96 104 |
| adult liver | Clontech | ALV003 | 48 92 |
| ovary | Invitrogen | AOV001 | 1 3 7 9 12 15-16 |
| | | | 18 21 26 31-32 35- |
| | | | 36 39-42 44 46-47 |
| | | | 50-52 54-60 64-66 |
| | | | 68-69 76-80 85 87 |
| | | | 90-91 93-94 98-99 |
| | | | 105 |
| placenta | Invitrogen | APL001 | 105 |
| placenta | Invitrogen | APL002 | 21 29 34-36 53 77- |
| | | | 78 |
| adult spleen | GIBCO | ASP001 | 9 12 31-32 40 53 |
| | | | 59-60 73 76 78 92 |
| | | | 108 |
| testis | GIBCO | ATS001 | 16 21 31-33 40 54 |
| | | | 59 79 100-101 105 |
| fibroblasts | Julio_m | BAC001 | 37-38 |
| NULL | Research | BAC002 | 37-38 |
| fibroblasts | Julio_M | BAC003 | 37-38 |
| bladder | Invitrogen | BLD001 | 20-21 39 47 59 74 |
| bone marrow | Clontech | BMD001 | 1 3 9 11-12 14 19 |
| | | | 21 30-32 36 40 46 |
| | | | 49-50 54 56-58 60 |
| | | | 64-65 79-80 83 87 |
| | | | 90 96 99-101 105 |
| | | | 108 |
| bone marrow | GF | BMD002 | 1-2 8-9 11-12 14- |
| | | | 15 21 40-41 53 59- |
| | | | 61 63 75 87 104 |
| | | | 108 |
| NULL | null | CGSd004 | 3 |
| NULL | null | CGSd005 | 96 |
| NULL | null | CGSd006 | 23-26 |
| NULL | null | CGd007 | 14 21 |
| NULL | null | CGd008 | 14 21 |
| mixed | EST | CGd010 | 3 24 40 |
| mixed | null | CGd011 | 13 39 90 |
| mixed | null | CGd012 | 3-4 13 17 21 23-24 |
| | | | 61 |
| mixed | null | CGd013 | 40 |
| mixed | null | CGd016 | 1 9 20 |
| colon | Invitrogen | CLN001 | 2 39 49 57-58 70 |
| | | | 91 |
| | null | CTL016 | |
| | null | CTL0201 | 48 57-58 |
| | BioChain | CVX001 | 1-2 4 9 14 21 31- |
| | | | 32 39-41 56 59 63- |
| | | | 64 75 78-79 87 90 |
| endothelial cells | Strategene | EDT001 | 1 3 7 9 12 15-16 |
| | | | 26 30-33 36 39-41 |
| | | | 47 49-55 59-60 65 |
| | | | 70 74 76-77 81 83 |
| | | | 85 87 91 96 98-101 |
| | | | 104-l05 |
| fibroblast | Julio_m | EPM001 | 37-38 102-103 |
| epilepsy | | | |
| fibroblast | Julio_m | EPM003 | 37-38 |
| epilepsy | | | |
| fibroblast | Julio_ | EPM004 | 37-38 103 |
| epilepsy | | | |
| esophagus | BioChain | ESO002 | 12 |
| fetal brain | Clontech | FBR001 | 61 |
| fetal brain | Clontech | FBR004 | 8 12 65 |
| fetal brain | Clontech | FBR006 | 8 10 12 14 21-22 |
| | | | 24 26 33 36 41 50 |
| | | | 56-58 63 65-66 72 |
| | | | 74-75 77-78 84-85 |
| | | | 90 98 100-101 105 |
| fetal brain | Invitrogen | FBT002 | 9 21 25 41 49-50 |
| | | | 53 55 67 78 91 97 |
| | | | 107 |
| fetal heart | Invitrogen | FHR001 | 59 79 |
| fetal kidney | Clontech | FKD001 | 31-32 40 46 53 65 |
| | | | 74 78 |
| fetal kidney | Clontech | FKD002 | 40 59 |
| fetal kidney | Invitrogen | FKD007 | 56 59 |
| fetal lung | Clontech | FLG001 | 12 40 54 57-58 |
| fetal lung | Invitrogen | FLG003 | 21 39 50 78 105 |
| fetal lung | Clontech | FLG004 | 40 |
| fetal liver-spleen | Soares | FLS001 | 1 3 5 7 9-12 14 |
| | | | 17-18 20-22 26 29- |
| | | | 32 34 39-41 44 46- |
| | | | 53 55-61 67 70 73- |
| | | | 74 76-79 83-85 87 |
| | | | 90-92 98-101 105 |
| | | | 108 |
| fetal liver-spleen | Soares | FLS002 | 3-5 7 10-11 14 17- |
| | | | 22 26 28-30 33-35 |
| | | | 39-41 46-53 56-58 |
| | | | 60-61 63-69 71 76 |
| | | | 78-79 81-83 86-87 |
| | | | 90-99 105 |
| fetal liver-spleen | Soares | FLS003 | 1 4 48 83 |
| fetal liver | Invitrogen | FLV001 | 2 14 18 20 35-36 |
| | | | 41 48 55 60-61 68- |
| | | | 69 76 79 85 91 |
| | | | 100-101 |
| fetal liver | Clontech | FLV004 | 7 20 41 44 92 |
| fetal muscle | Invitrogen | FMS001 | 2 21 40-41 50 52 |
| | | | 94 |
| fetal muscle | Invitrogen | FMS002 | 2 40 76 |
| fetal skin | Invitrogen | FSK001 | 2 4 6 11 15 19 23 |
| | | | 31-32 34 39-41 4 |
| | | | 49-50 52 56 59-60 |
| | | | 70 77-80 90 94 99 |
| | | | 105-106 |
| fetal skin | Invitrogen | FSK002 | 12 18 26 39-40 57- |
| | | | 58 78 |
| fetal spleen | BioChain | FSP001 | 40 |
| umbilical cord | BioChain | FUC001 | 1-3 12 15-16 19 21 |
| | | | 26 30-32 39-41 49 |
| | | | 52-53 56-59 65 77 |
| | | | 79-81 90 |
| fetal brain | GIBCO | HFB001 | 1 4 6-7 13-14 22 |
| | | | 26 31-32 40-41 46- |
| | | | 47 50 52 54 56-59 |
| | | | 65-66 72 75 77 79 |
| | | | 83 91 94 97 99 105 |
| | | | 107 |
| macrophage | Invitrogen | HMP001 | 41 |
| infant brain | Soares | IB2002 | 1-4 7 10 12-13 15 |
| | | | 21 25-26 30-33 40- |
| | | | 41 44 46 50 62 65 |
| | | | 68-69 73 75 77-79 |
| | | | 90 107 |
| infant brain | Soares | IB2003 | 3 13 21 26 39-41 |
| | | | 50 57-58 62 64-65 |
| | | | 77 79 105 107 |
| infant brain | null | IBM002 | 46 66 75 78 |
| infant brain | null | IBS001 | 2 13 41 67 78 |
| lung, fibroblast | Strategene | LFB001 | 9 12 16 21 26 52- |
| | | | 53 57-58 85 89-91 |
| | | | 100-101 105 |
| adult lung | Invitrogen | LGT002 | 2-3 7 11-12 14 17 |
| | | | 21 30-32 35-36 39 |
| | | | 41 45 47 50 52-54 |
| | | | 56 60 63-66 72 78- |
| | | | 79 85 91-94 97-98 |
| | | | 100-101 105 107 |
| lymphocyte | ATCC | LPC001 | 8-10 12 15 21 40 |
| | | | 45-46 53 60 63-64 |
| | | | 76 87 |
| leukocytes | GIBCO | LUC001 | 2 7 9 11-12 14 16 |
| | | | 19 21 26 30-32 35 |
| | | | 39-41 46-47 50 53 |
| | | | 90-92 96-99 105 |
| leukocytes | Clontech | LUC003 | 7 21 40 49 |
| melanoma | Clontech | MEL004 | 1 7 12 16 21 31-32 |
| | | | 47 49 75 78-79 |
| mammary gland | Invitrogen | MMG001 | 6 9 11 14-15 20-21 |
| | | | 33 35-36 39-41 49- |
| | | | 50 53-54 59-61 67- |
| | | | 70 76-78 84-85 87 |
| | | | 90 94 96-97 99-101 |
| | | | 104 |
| neuron | Strategene | NTD001 | 7 40 47 57-58 65 |
| | | | 92 94 98 105 |
| neuron | Strategene | NTR001 | 16 |
| neuronal cells | Strategene | NTU001 | 7 11-12 18 33 40 |
| | | | 44 50 98 105-106 |
| NULL | null | PCR2V1 | 40-41 75 |
| NULL | null | PGEMV1 | 1 9 14 40 48 92 |
| pituitary gland | Clontech | PIT004 | 7 21 31-32 40-41 |
| | | | 54-55 |
| prostate | Clontech | PRT001 | 9 16 21-22 33 40- |
| | | | 41 46 49 53 59 79 |
| | | | 96 |
| rectum | Invitrogen | REC001 | 1-2 10 14 20-21 59 |
| salivary gland | Clontech | SAL001 | 1 31-32 53 97-98 |
| small intestine | Clontech | SIN001 | 1 9 12 21 45 54 87 |
| | | | 96 100-101 108 |
| skeletal muscle | Clontech | SKM001 | 41 66 76 85 |
| spinal cord | Clontech | SPC001 | 1-2 12 18-21 31-32 |
| | | | 50 54 60 70 107 |
| adult spleen | Clontech | SPLc01 | 12 17 30 40 56 60 |
| stomach | Clontech | STO001 | 15 21 31-32 60-61 |
| | | | 63 70 76 91 |
| mix | null | SUP005 | 3 40-41 |
| mix | null | SUP008 | 14 21 30 |
| mix | null | SUP009 | 21 40 57-58 |
| thalamus | Clontech | THA002 | 9 13 15 20 66 68- |
| | | | 69 74 |
| thymus | Clonetech | THM001 | 1-2 11 21 30 40-42 |
| | | | 49 51 59-60 74 78 |
| | | | 84 |
| thymus | Clontech | THMc02 | 2 14 18 20-21 26- |
| | | | 27 30 41 49 52 55 |
| | | | 60 63 65-66 77 83- |
| | | | 84 90 105 107 |
| thyroid gland | Clontech | THR001 | 2 7 9 12 14 16 21 |
| | | | 31-33 35-36 40-41 |
| | | | 46-47 50 53 57-59 |
| | | | 64-69 72 77 79 83 |
| | | | 85 90-91 98 100- |
| | | | 101 104-105 107 |
| trachea | Clontech | TRC001 | 10 61 70 90 107 |
| uterus | Clontech | UTR001 | 2 9 40 59 74 87 |
| | | | 107 |

[0384] TABLE 2

| | CORRESPONDING | | | | |
|---|---|---|---|---|---|
| | SEQ ID NO | | | | |
| SEQ | ASSIGNED IN | | | SMITH- | |
| ID | U.S.S.N. | ACCESSION | | WATERMAN | |
| NO: | 09/574,454 | NUMBER | DESCRIPTION | SCORE | % IDENTITY |
| 1 | 75 | AK000256 | Homo sapiens unnamed | 1085 | 100 |
| | | | protein product | | |
| 2 | 129 | AL050348 | Homo sapiens dJ447F3.3 | 1717 | 98 |
| | | | (similar to RELA (v-rel | | |
| | | | avian | | |
| | | | reticuloendotheliosis | | |
| | | | viral oncogene homolog | | |
| | | | A (nuclear factor of | | |
| | | | kappa light polypeptide | | |
| | | | gene enhancer in B- | | |
| | | | cells 3 (p65))) | | |
| 3 | 160 | AB033117 | Homo sapiens KIAA1291 | 3940 | 100 |
| | | | protein | | |
| 4 | 352 | AF108459 | Homo sapiens ubinuclein | 5804 | 100 |
| 5 | 383 | AK000385 | Homo sapiens unnamed | 127 | 55 |
| | | | protein product | | |
| 6 | 726 | AF169149 | Homo sapiens L-CaBP1 | 1176 | 99 |
| 7 | 740 | AF068296 | Homo sapiens HDCMD11P | 742 | 100 |
| 8 | 764 | AF161537 | Homo sapiens HSPC052 | 637 | 96 |
| 9 | 793 | AE003631 | Drosophila melanogaster | 195 | 34 |
| | | | CG16917 gene product | | |
| 10 | 932 | S80864 | Homo sapiens cytochrome | 98 | 41 |
| | | | c-like polypeptide | | |
| 11 | 944 | AK001330 | Homo sapiens unnamed | 1192 | 100 |
| | | | protein product | | |
| 12 | 1129 | AJ007398 | Homo sapiens PBK1 | 2460 | 99 |
| | | | protein | | |
| 13 | 1139 | Z99714 | Homo sapiens bK1048E9.6 | 737 | 51 |
| | | | (novel protein similar | | |
| | | | to ASPH (aspartate | | |
| | | | beta-hydroxylase, EC | | |
| | | | 1.14.11.16)) | | |
| 14 | 1696 | AF151793 | Homo sapiens ALG-2 | 4473 | 99 |
| | | | interacting protein 1 | | |
| 15 | 1759 | AF233522 | Homo sapiens gamma- | 3194 | 99 |
| | | | adaptin related | | |
| | | | protein, GGA2 | | |
| 16 | 1779 | X67247 | Homo sapiens ribosomal | 1101 | 100 |
| | | | protein S8 | | |
| 17 | 1924 | AB033024 | Homo sapiens KIAA1198 | 2964 | 100 |
| | | | protein | | |
| 18 | 2028 | AF084557 | Homo sapiens RAB3A | 1596 | 99 |
| | | | interacting protein- | | |
| | | | like 1 | | |
| 19 | 2031 | AF150735 | Homo sapiens | 586 | 100 |
| | | | proteinx0008 | | |
| 20 | 2043 | AF169034 | Homo sapiens protein | 1954 | 100 |
| | | | kinase | | |
| 21 | 2074 | AB007931 | Homo sapiens KIAA0462 | 11748 | 100 |
| | | | protein | | |
| 22 | 2082 | AB007830 | Homo sapiens CSR2 | 2327 | 99 |
| 23 | 2613 | AB032971 | Homo sapiens KIAA1145 | 2256 | 99 |
| | | | protein | | |
| 24 | 2641 | AB032958 | Homo sapiens KIAA1132 | 9116 | 100 |
| | | | protein | | |
| 25 | 2692 | AB033072 | Homo sapiens KIAA1246 | 4087 | 99 |
| | | | protein | | |
| 26 | 2716 | AF111168 | Homo sapiens unknown | 2453 | 97 |
| 27 | 4308 | AF090944 | Homo sapiens PR00663 | 236 | 84 |
| 28 | 4428 | A2010144 | Homo sapiens neuronal | 236 | 62 |
| | | | thread protein AD7c-NTP | | |
| 29 | 4455 | AF047441 | Homo sapiens RNA | 132 | 85 |
| | | | polymerase I 4OkD | | |
| | | | subunit | | |
| 30 | 4495 | AF178669 | Rattus norvegicus p34 | 1413 | 85 |
| 31 | 4764 | AF058700 | Bos taurus ubiquitin- | 827 | 100 |
| | | | S27a fusion protein | | |
| 32 | 4764 | AF058700 | Bos taurus ubiquitin- | 707 | 89 |
| | | | S27a fusion protein | | |
| 33 | 4951 | AF117229 | Homo sapiens protein x | 1456 | 97 |
| | | | 0004 | | |
| 34 | 5012 | AF081797 | Mus musculus high | 121 | 35 |
| | | | cysteine keratin- | | |
| | | | associated protein 12.1 | | |
| 35 | 5066 | AL049846 | Homo sapiens | 2148 | 100 |
| | | | hypothetical protein | | |
| 36 | 5068 | AF161484 | Homo sapiens HSPC135 | 726 | 84 |
| 37 | 5176 | M12987 | Plasmid F Protein E | 1298 | 99 |
| 38 | 5209 | M12987 | Plasmid F Protein E | 1309 | 100 |
| 39 | 5233 | AF034803 | Homo sapiens liprin- | 4052 | 99 |
| | | | beta2 | | |
| 40 | 5273 | AB015610 | Chlorocebus aethiops | 1382 | 100 |
| | | | ribosomal protein S4X | | |
| 41 | 5319 | AF195951 | Homo sapiens signal | 1623 | 88 |
| | | | recognition particle 68 | | |
| 42 | 5378 | AF090944 | Homo sapiens PRO0663 | 238 | 77 |
| 43 | 5397 | Z14244 | Homo sapiens cytochrome | 328 | 70 |
| | | | c oxidase subunit VIIb | | |
| 44 | 5409 | AF126781 | Homo sapiens retinal | 1382 | 99 |
| | | | short-chain | | |
| | | | dehydrogenase/reductase | | |
| | | | retSDR3 | | |
| 45 | 5459 | AK000241 | Homo sapiens unnamed | 173 | 56 |
| | | | protein product | | |
| 46 | 5511 | AE003613 | Drosophila melanogaster | 700 | 49 |
| | | | CG16947 gene product | | |
| 47 | 5520 | Z35093 | Homo sapiens SURF-1 | 1019 | 100 |
| 48 | 5525 | X04494 | Homo sapiens precursor | 1903 | 100 |
| | | | polypeptide | | |
| 49 | 5544 | D38553 | Homo sapiens KIAA0074; | 3905 | 99 |
| | | | The ha1438 gene product | | |
| | | | is related to a C728 | | |
| | | | protein encoded in | | |
| | | | S cerevisiae chromosome | | |
| | | | II.; human homologue of | | |
| | | | XCAP-H, Acc #:U90125 | | |
| 50 | 5546 | L06845 | Homo sapiens cysteinyl- | 3047 | 97 |
| | | | tRNA synthetase | | |
| 51 | 5547 | AF136630 | Homo sapiens | 954 | 99 |
| | | | heterochromatin-like | | |
| | | | protein 1 | | |
| 52 | 5564 | AK001655 | Homo sapiens unnamed | 1882 | 100 |
| | | | protein product | | |
| 53 | 5617 | U37690 | Homo sapiens RNA | 358 | 100 |
| | | | polymerase II subunit | | |
| 54 | 5687 | AK001321 | Homo sapiens unnamed | 1058 | 96 |
| | | | protein product | | |
| 55 | 5688 | U58766 | Homo sapiens FX | 430 | 93 |
| 56 | 5713 | Z19054 | Homo sapiens beta | 4016 | 100 |
| | | | catenin | | |
| 57 | 5718 | X93209 | Homo sapiens NRD1 | 6046 | 99 |
| | | | convertase | | |
| 58 | 5718 | X93207 | Homo sapiens NRD2 | 6394 | 99 |
| | | | convertase | | |
| 59 | 5720 | AL050318 | Homo sapiens dJ977B1.5 | 904 | 100 |
| | | | (myosin regulatory | | |
| | | | light chain 2, smooth | | |
| | | | muscle isoform) | | |
| 60 | 5804 | AF077208 | Homo sapiens HSPC022 | 663 | 100 |
| 61 | 5805 | D00044 | Homo sapiens pLD78 | 476 | 100 |
| | | | peptide | | |
| 62 | 5812 | U11271 | Homo sapiens | 136 | 72 |
| | | | thromboxane A2 receptor | | |
| 63 | 5824 | AL049667 | Homo sapiens | 2590 | 99 |
| | | | hypothetical protein | | |
| 64 | 5827 | AE003628 | Drosophila melanogaster | 965 | 55 |
| | | | CG5395 gene product | | |
| 65 | 5830 | X05323 | Homo sapiens MRC OX-2 | 1362 | 99 |
| 66 | 5835 | AC013482 | Arabidopsis thaliana | 364 | 30 |
| | | | T26F17.9 | | |
| 67 | 5838 | AK000496 | Homo sapiens unnamed | 181 | 59 |
| | | | protein product | | |
| 68 | 5840 | AJ243951 | Homo sapiens deafness | 441 | 100 |
| | | | locus associated | | |
| | | | putative guanine | | |
| | | | nucleotide exchange | | |
| | | | factor | | |
| 69 | 5840 | AJ243951 | Homo sapiens deafness | 929 | 100 |
| | | | locus associated | | |
| | | | putative guanine | | |
| | | | nucleotide exchange | | |
| | | | factor | | |
| 70 | 5845 | AJ245905 | Chlorocebus aethiops | 165 | 94 |
| | | | HSBP1-like protein | | |
| 71 | 5849 | M13485 | Homo sapiens | 387 | 100 |
| | | | metallothionein I-B | | |
| 72 | 5871 | AB032991 | Homo sapiens KIAA1165 | 1509 | 99 |
| | | | protein | | |
| 73 | 5877 | AJ000480 | Homo sapiens | 1157 | 99 |
| | | | phosphoprotein | | |
| 74 | 5884 | AF092136 | Homo sapiens PTD015 | 419 | 97 |
| 75 | 5886 | AF090190 | Mus musculus kinesin- | 6947 | 96 |
| | | | like protein KIF1B | | |
| 76 | 5897 | AF021031 | Mus musculus Dgcr6 | 880 | 92 |
| | | | protein | | |
| 77 | 5902 | AK001631 | Homo sapiens unnamed | 1359 | 96 |
| | | | protein product | | |
| 78 | 5918 | D83777 | Homo sapiens expressed | 871 | 54 |
| | | | ubiquitously with | | |
| | | | strong expression in | | |
| | | | brain | | |
| 79 | 5950 | AK001913 | Homo sapiens unnamed | 2599 | 99 |
| | | | protein product | | |
| 80 | 5976 | AK000301 | Homo sapiens unnamed | 146 | 57 |
| | | | protein product | | |
| 81 | 6034 | V01201 | Rattus norvegicus | 151 | 48 |
| | | | coding sequence of p15E | | |
| 82 | 6072 | M15887 | Homo sapiens endozepine | 320 | 79 |
| | | | precursor | | |
| 83 | 6077 | X02751 | Homo sapiens N-ras gene | 979 | 100 |
| | | | product (aa 1-189) | | |
| 84 | 6115 | AK000202 | Homo sapiens unnamed | 871 | 100 |
| | | | protein product | | |
| 85 | 6181 | AL161495 | Arabidopsis thaliana | 136 | 33 |
| | | | small nuclear | | |
| | | | riboprotein Sm-D1-like | | |
| | | | protein | | |
| 86 | 6206 | X92485 | Plasmodium vivax pval | 174 | 46 |
| 87 | 6216 | AB018304 | Homo sapiens KIAA0761 | 2091 | 99 |
| | | | protein | | |
| 88 | 6226 | AE003690 | Drosophila melanogaster | 644 | 68 |
| | | | CG4800 gene product | | |
| 89 | 6231 | AF037371 | Mus musculus cytochrome | 416 | 100 |
| | | | c oxidase subunit VIIa- | | |
| | | | L precursor | | |
| 90 | 6240 | AK000541 | Homo sapiens unnamed | 1832 | 100 |
| | | | protein product | | |
| 91 | 6255 | AE003472 | Drosophila melanogaster | 408 | 38 |
| | | | CG13922 gene product | | |
| 92 | 6270 | J02619 | Homo sapiens alpha-1- | 896 | 100 |
| | | | antitrypsin precursor | | |
| 93 | 6282 | AE003603 | Drosophila melanogaster | 516 | 55 |
| | | | CG1172 gene product | | |
| 94 | 6292 | AK001066 | Homo sapiens unnamed | 1156 | 100 |
| | | | protein product | | |
| 95 | 6295 | M58661 | Mus musculus M1/69-J11d | 139 | 50 |
| | | | heat-stable antigen | | |
| 96 | 6299 | AE002319 | Chlamydia muridarum 3- | 487 | 46 |
| | | | oxoacyl-(acyl carrier | | |
| | | | protein) reductase | | |
| 97 | 6301 | AC006344 | Homo sapiens verified | 951 | 100 |
| | | | by mouse ESTs AA617614 | | |
| | | | (NID:g2504819) and | | |
| | | | AA237696 (NID:g1861718) | | |
| 98 | 6307 | AE003584 | Drosophila melanogaster | 833 | 73 |
| | | | CG7085 gene product | | |
| 99 | 6310 | AL031427 | Homo sapiens dJ167A19.4 | 2232 | 99 |
| | | | (novel protein) | | |
| 100 | 6312 | X99726 | Homo sapiens | 559 | 99 |
| | | | mitochondrial NADH- | | |
| | | | Ubiquinone | | |
| | | | oxidoreductase 10-kDa | | |
| | | | subunit | | |
| 101 | 6312 | X59048 | Bos taurus NADH | 257 | 81 |
| | | | dehydrogenase | | |
| | | | (ubiquinone) | | |
| 102 | 6323 | X01563 | Escherichia coli | 198 | 100 |
| | | | unidentified reading | | |
| | | | frame X (aa 1-38) | | |
| 103 | 6343 | X04051 | Bacteriophage phi-80 | 371 | 100 |
| | | | xis-polypeptide (aa 1- | | |
| | | | 65) | | |
| 104 | 6357 | AB034206 | Homo sapiens MCT-1 | 921 | 95 |
| 105 | 6364 | AB033017 | Homo sapiens KIAA1191 | 526 | 100 |
| | | | protein | | |
| 106 | 6369 | AB011540 | Homo sapiens MEGF7 | 8514 | 99 |
| 107 | 6375 | AB014516 | Homo sapiens KIAA0616 | 3309 | 100 |
| | | | protein | | |
| 108 | 6379 | Z70292 | Homo sapiens chemokine | 477 | 100 |
| | | | CC-1 | | |

What is claimed is:

1. An isolated polynucleotide comprising a nucleotide sequence selected from the group consisting of SEQ ID NO: 1-108, a mature protein coding portion of SEQ ID NO: 1-108, an active domain of SEQ ID NO:1-108, and complementary sequences thereof.

2. An isolated polynucleotide encoding a polypeptide with biological activity, wherein said polynucleotide hybridizes to the polynucleotide of claim 1 under stringent hybridization conditions.

3. An isolated polynucleotide encoding a polypeptide with biological activity, wherein said polynucleotide has greater than about 90% sequence identity with the polynucleotide of claim 1.

4. The polynucleotide of claim 1 wherein said polynucleotide is DNA.

5. An isolate d polynucleotide of claim 1 wherein said polynucleotide comprises the complementary sequences.

6. A vector comprising the polynucleotide of claim 1.

7. An expression vector comprising the polynucleotide of claim 1.

8. A host cell genetically engineered to comprise the polynucleotide of claim 1.

9. A host cell genetically engineered to comprise the polynucleotide of claim 1 operatively associated with a regulatory sequence that modulates expression of the polynucleotide in the host cell.

10. An isolated polypeptide, wherein the polypeptide is selected from the group consisting of:
(a) a polypeptide encoded by any one of the polynucleotides of claim 1; and
(b) a polypeptide encoded by a polynucleotide hybridizing under stringent conditions with any one of SEQ ID NO: 1-108.

11. A composition comprising the polypeptide of claim 10 and a carrier.

12. An antibody directed against the polypeptide of claim 10.

13. A method for detecting the polynucleotide of claim 1 in a sample, comprising:
a) contacting the sample with a compound that binds to and forms a complex with the polynucleotide of claim 1 for a period sufficient to form the complex; and
b) detecting the complex, so that if a complex is detected, the polynucleotide of claim 1 is detected.

14. A method for detecting the polynucleotide of claim 1 in a sample, comprising:
a) contacting the sample under stringent hybridization conditions with nucleic acid primers that anneal to the polynucleotide of claim 1 under such conditions;
b) amplifying a product comprising at least a portion of the polynucleotide of claim 1; and
c) detecting said product and thereby the polynucleotide of claim 1 in the sample.

15. The method of claim 14, wherein the polynucleotide is an RNA molecule and the method further comprises reverse transcribing an annealed RNA molecule into a cDNA polynucleotide.

16. A method for detecting the polypeptide of claim 10 in a sample, comprising:
a) contacting the sample with a compound that binds to and forms a complex with the polypeptide under conditions and for a period sufficient to form the complex; and
b) detecting formation of the complex, so that if a complex formation is detected, the polypeptide of claim 10 is detected.

17. A method for identifying a compound that binds to the polypeptide of claim 10, comprising:
a) contacting the compound with the polypeptide of claim 10 under conditions sufficient to form a polypeptide/compound complex; and
b) detecting the complex, so that if the polypeptide/compound complex is detected, a compound that binds to the polypeptide of claim 10 is identified.

18. A method for identifying a compound that binds to the polypeptide of claim 10, comprising:
a) contacting the compound with the polypeptide of claim 10, in a cell, under conditions sufficient to form a polypeptide/compound complex, wherein the complex drives expression of a reporter gene sequence in the cell; and
b) detecting the complex by detecting reporter gene sequence expression, so that if the polypeptide/compound complex is detected, a compound that binds to the polypeptide of claim 10 is identified.

19. A method of producing the polypeptide of claim 10, comprising,
a) culturing a host cell comprising a polynucleotide sequence selected from the group consisting of a polynucleotide sequence of SEQ ID NO: 1-108, a mature protein coding portion of SEQ ID NO: 1-108, an active domain of SEQ ID NO: 1-108, complementary sequences thereof and a polynucleotide sequence hybridizing under stringent conditions to SEQ ID NO: 1-108, under conditions sufficient to express the polypeptide in said cell; and
b) isolating the polypeptide from the cell culture or cells of step (a).

20. An isolated polypeptide comprising an amino acid sequence selected from the group consisting of any one of the polypeptides from the Sequence Listing, the mature protein portion thereof, or the active domain thereof.

21. The polypeptide of claim 20 wherein the polypeptide is provided on a polypeptide array.

22. A collection of polynucleotides, wherein the collection comprising the sequence information of at least one of SEQ ID NO: 1-108.

23. The collection of claim 22, wherein the collection is provided on a nucleic acid array.

24. The collection of claim 23, wherein the array detects full-matches to any one of the polynucleotides in the collection.

25. The collection of claim 23, wherein the array detects mismatches to any one of the polynucleotides in the collection.

26. The collection of claim 22, wherein the collection is provided in a computer-readable format.

27. A method of treatment comprising administering to a mammalian subject in need thereof a therapeutic amount of a composition comprising a polypeptide of claim 10 or 20 and a pharmaceutically acceptable carrier.

28. A method of treatment comprising administering to a mammalian subject in need thereof a therapeutic amount of a composition comprising an antibody that specifically binds to a polypeptide of claim 10 or 20 and a pharmaceutically acceptable carrier.

The application's sequence listing, which the Patent Office published only in electronic form, follows.

SEQUENCE LISTING (108 sequences)

SEQ ID NO: 1 - DNA, 2092 bp, Homo sapiens
  CDS (129)..(1583)
gccgtaccgctccggaattcccgggtcgacccacgcgtccggtttccgcggagcggacccagcaatgacggatgatatcacctcttcttctctggtgagagtctgaggatagagacttttttctcaccatgaatgtcaccccagaggtcaagagtcgtgggatgaagtttgctgaggagcagctgctaaagcatggatggactcaaggcaaaggcctcggccggaaggagaatggtatcactcaggctctcagggtgacactgaagcaagacactcatggggtaggacatgaccctgccaaggagttcacaaaccactggtggaatgagctcttcaacaagactgcggccaacttggtagtggaaactgggcaggatggagtacagataaggagcctttctaaggagaccacccgttataatcatcccaagcccaacttgctgtatcagaagtttgtgaagatggctacattgacttcaggtggagagaagccaaacaaagacttggagagctgcagtgatgacgacaaccaggggtccaagtccccaaagattctgactgatgagatgctgctccaagcctgtgaggggcgaacagcacacaaggctgcccgtcttgggatcacaatgaaggccaagcttgctcgcctagaggcccaggagcaggccttcctggctcgtctcaaaggccaggaccctggggcccctcaactgcagtcagagagcaagccccccaaaaaaaagaaaaagaaaaggaggcagaaagaggaggaagaagctacagcatctgaaaggaatgatgcagatgagaagcacccagaacatgctgagcagaacatcagaaaaagcaaaaaaaagaaaaagaaaaggaggcagaaagaggaggaagaagctacagcatctgaaaggaatgatgcagatgagaagcacccagaacatgctgagcagaacatcagaaaaagcaagaagaagaaaaggcgacatcaagaaggaaaggtctcagatgaaagagagggtacaactaaagggaatgagaaggaggacgctgcaggaacaagtgggcttggggaattgaatagcagagagcaaaccaatcagtccctcaggaaagggaagaaaaagaagaggtggcaccatgaagaggagaagatgggggtcttggaggaaggaggaaaaggcaaggaggctgcaggcagtgtcaggacagaggaggtagagagcagggcatatgctgacccatgcagccgaagaaagaagaggcagcaacaggaggaggaggacttgaacctagaagatagaggtgaggaaactgttttaggtggtggaaccagggaagcagagagcagagcatgcagtgatggaagaagcaggaaaagcaagaagaaaagacagcagcatcaagaggaggaggacatcttggatgtaagggatgagaaggatagcggggctagggaagcagagagcagagcacacactggctcaagcagcagaggtaagaggaagaggcagcagcatcccaagaaggaaagagctggagtcagcactgtccagaaagccaaaaagaaacagaagaagagagactaaaggtctggtaaaggtagggctcaattgattgattttcaggagttgaagcctcaaagaccagggttgatgcaggtctgcaggtcttctgcacccccctcaatgaggagtccctcccagaaaggaaactgatctctgggatgtcagctgctgagaggagcaagcggtagtaccaccccttagttgagggagtcagcacagtcctttctgcagcttctaacccaggaccatgaactcaggtgcctagagaagccaggcagctaaaggacaaggaatgctgggggctgtgggaacaggaatgcagataccctttgaaggagcattcctgctaaaagaagctgaaaatgtagacctatgtgaagtgctctgatttctaaatattgtgaaggttaagaaaaacataaatttaggtctatgggctagatttagcccacagttgccagtttctagcgctaccaaatgaatgaataaacatgagcttgcgctcctagcctagagataaaaaaaaaaaa

SEQ ID NO: 2 - DNA, 1295 bp, Homo sapiens
  CDS (72)..(1061)
cggtaccgctccggaattcccgggtcgacccacgcgtccggtccagcggagttgtgggggccggaggcgccatgggagccactggcgacgccgagcagccgcggggacccagcggggccgagaggggcggcttggagctgggggatgcgggcgcagcggggcagctggttcttacgaacccttggaacataatgataaagcaccggcaggtgcagcggaggggccgccgctcacagatgacaacaagtttcacagatcctgccatctccatggatctcctccgagctgtcctgcagcccagcatcaacgaggagatccagactgtcttcaacaagtacatgaagttcttccagaaggcagcactgaacgtgcgagacaatgttggggaggaggtggacgcagagcagctgatccaggaagcctgtcggagctgcctggagcaggctaaactgctcttttcagatggagaaaaagtaatacccagattgacccatgagcttccaggaataaagcgtggccgtcaggcagaagaagaatgtgcccatcgaggaagcccccttcctaaaaagaggaaaggacggcctcctggacacatcctgtcaagcgaccgggcagccgccggcatggtatggaaaccaaaatcctgtgaaccaattcgccgggaaggccccaagtgggacccagctcgcctgaatgaatctaccacctttgtgttgggatctcgagccaacaaagccctggggatggggggcaccagaggaagaatctacatcaagcacccacacctctttaagtatgcagctgacccccaggataagcactggctggctgagcagcatcacatgcgggcaacagggggcaagatggcctacctcctcatcgaggaggacatccgggaccttgcggccagtgatgattacagaggatgcctggatctgaagctagaggaattgaaatcctttgtcctaccctcctggatggtggagaagatgagaaagtatatggagacactacggacagagaatgagcatcgtgctgttgaagcacctccacagacctgaggccgggtcccctggccacacttggcagccctcctccaaagcccttttcctcacgtggttgaggccaccgctgggactgctcctagatggatttcagcggcattaagctgtgcctgagcgagtttgtagtgactcactgcacagcacccccagactagcatgtggttttatatttgtaaagttattgggataagaaacaattaaacagtttgtagtaaacccaaaaaaaaaaaa

SEQ ID NO: 3 - DNA, 2811 bp, Homo sapiens
  CDS (502)..(2778)
gatcctcctacctcactctcccaagttactgggactataggagcatgccaccacacctggctactttttgtattttttggtagagactgggtctcactgtattgcccaaactggttttgaactcttgggcacaagcagtctgaccaccttggcctcctaaagtgctaggatttcaggcgtgagctactgtgcccaatcctgatttccttttaattcaaacagaaatgggagactaagtttagtttgccacttacaggatctagctggtaatacagtttccagagatcatttattttcaaaaacttctggattcgttaataaagttttattgagtgattattacatgcaaagcacaagtctgcaaaacagttcctttgaatgcttttcccctagggtggtaaattaataaacattaagtacttattttataccagttattgattcctgtccttcccttggcattttctcttggcagcctcccgagcacaacaaggagaggtgatgaggttggcatgtcgtttggatcccaaaactagcttccagatggctggggagtggctaaagtatcaactatcaacttttcttgatgctggttctgtgaattcttgttctgcagttggaactggagaaggaagcctctgttccgtcttctcaccttcattcgtgcagtgggaagccatgactctttttttggaaagtgttatcacccagatgtttcgaacactaaatagagaagaaattcctgttaatgatggaatagagctattgcagatggttctgaactttgataccaaggatcccctcatcctgtcctgcgtccttactaatgtctctgcactctttccatttgtcacctacagaccagagttcctgccccaggtcttctctaagctattttcatctgtcacttttgaaactgttgaagaaagtaaggcccccagaacccgggcagtgaggaatgtgaggaggcatgcttgttcctccatcatcaagatgtgtcgtgactacccccagcttgtgctgcccaattttgacatgctttataaccatgtgaagcaactcctctccaatgagctactcctgacacaaatggagaagtgtgccctcatggaagccctggttctcattagcaaccaatttaagaactacgagcgtcagaaggtgttcctagaggagctgatggcaccagtggccagcatctggctttctcaagacatgcacagagtgctgtcagatgttgatgctttcattgcgtatgtgggtacagatcagaagagctgtgacccaggcctggaggatccgtgtggcttaaaccgtgcacgaatgagcttttgtgtatacagcattctgggtgtggtgaaacgaacttgctggcccactgacctagaagaggccaaagctgggggatttgtggtgggttatacatccagtggaaatccaatcttccgtaacccctgcacagagcagattctgaaacttcttgacaatttgcttgcgcttataagaacccacaatacattatatgcaccagaaatgctagccaaaatggcagagcctttcaccaaggctctggatatgcttgacgcggaaaaatctgctatattaggattacctcaacctctcttggaactcaatgactctcctgtcttcaaaaccgtcttggaaagaatgcagcgtttcttctctaccctctatgaaaactgttttcatatcctagggaaggcaggcccttccatgcagcaagacttctatactgtggaggaccttgctacccagcttctcagctcagcctttgtcaacttgaacaatattcctgactaccgactcagacccatgcttcgtgtctttgtaaagcctctggtgctcttctgtcccccagagcactatgaagccctggtatcccccatcctcggacctcttttcacctacctccatatgaggctttctcagaaatggcaagttatcaaccaaaggagcctgctgtgtggagaagatgaggctgcagatgaaaacccagagtctcaagagatgctggaggagcaactggtgaggatgttaacccgagaagtcatggacctaatcacggtttgctgtgtttcaaagaagggtgctgaccacagtagtgctcccccagcagatggagacgatgaagaaatgatggccacagaggtcaccccctcagctatggcagagcttacagacctgggcaaatgtctgatgaagcatgaggatgtttgtacagcgctattaattacagccttcaattccctggcctggaaagatactctgtcctgccagaggacaacctcacagctctgctggcctctcctcaaacaagtgctgtcagggacactgctcgcagatgcagttacgtggcttttcaccagtgtgctgaaaggcttacagatgcacgggcagcacgacgggtgcatggcttccctggtccatctggccttccagatatacgaggcactgcgccccaggtacctggagataagagctgtaatggagcaaatccctgaaatacagaaggactcactggaccagtttgactgcaagcttttaaacccctccctgcagaaagtggctgacaagcgccgaaaggaccaattcaaacgcctcattgctggttgcattgggaaacccttgggagagcagttccgaaaagaagttcacattaagaatcttccctcacttttcaaaaaaacaaagccaatgctggagacggaggtgctggacaatgatgggggtggcctggccaccatctttgaaccctgaatcaagcttttgggcatccttaaaaaaaaaaaa

SEQ ID NO: 4 - DNA, 3842 bp, Homo sapiens
  CDS (172)..(3576)
taagcttgcggccgcccgcccgctgggagccacggcttagcagccgaccgctagctgcgccgccgcccggggaccggcatgaggaccgccgcggggggacgtctgcggcccgcgtcggcgctggggacaaagaagccatgcagtgacacccgctaagacttgttggtagccatgtcggagccccacagggtccagttcacctctctcccaggttccctgaatcctgcgtttttgaagaagtcccggaaggaggaggctggggcaggagaacagcatcaggactgtgagccggctgcagcagctgttcggattacactcaccctctttgaaccagatcacaaacgctgcccagagttcttctacccagagctggtgaagaatatccgagggaaggtaaaaggccttcagcctggagataagaagaaagatctgtcagatcctttcaatgacgaagaaaaggaaaggcataaagtagaggcccttgcccgaaaatttgaagaaaaatacggtggaaagaaacgtagaaaagaccgaatacaggacttgatcgatatggggtatggttatgatgaatccgactccttcatcgataactctgaggcgtatgatgagcttgttcctgcttctttgactacgaagtatggaggattttacattaactcgggaaccctgcagtttagacaagcatcagagtctgaagatgacttcattaaagaaaagaagaaaaaatctccaaagaagcggaagttgaaggaaggtggtgagaagataaaaaaaaaaaaaaaagatgacacttatgacaaggagaagaaatcgaaaaagtccaagttttccaaagccggcttcacagccctcaatgccagtaaggagaagaagaagaagaaatattctggggctttaagcgttaaagagatgctaaagaaatttcagaaagagaaagaggctcagaaaaaaagggaggaggagcataagcctgttgcggtcccatcagcggaagctcagggcctgcgggaactggagggtgcctctgaccccttgctctcactctttggctctacttctgacaacgacttgctccaggcggccactgccatggactcgctgacggatttggacttggagcatctgctcagtgagtctccagaaggaagtcccttccgagatatggatgatggaagtgattcccttggggtgggattggaccaggaattcaggcagccctcttctctccccgaaggcctgccagcacccctggagaagcgcgttaaggagctggctcaggctgccagagctgctgagggggagagcagacagaagttcttcacccaggatattaatggaatcctattagacatagaggcgcagactcgggagctgagcagtcaggtccgctctggggtgtatgcctatcttgcgtcattcctgccctgcagcaaggatgccctgctcaagcgtgctcggaaacttcacctctatgaacaggggggccgtctgaaggagcctctccagaagctcaaggaagccattggcagggcgatgccagagcagatggccaagtaccaggacgaatgccaggcacacacgcaggcaaaggttgccaagatgctggaagaggagaaagacaaggagcagagggaccggatttgttcggatgaggaagaagatgaagaaaaagggggcaggaggataatgggacctcggaagaagttccaatggaatgatgagatcagggagctactgtgccaggtggtgaagatcaaactggagagccaggacctggagaggaacaacaaagcccaggcttgggaggactgtgtgaagggctttctggatgcggaagtcaagcccctctggcccaaaggctggatgcaggccagaactctgtttaaggagagcagacgaggccatgggcacctgacttcaatcctggccaagaagaaagttatggccccttctaaaatcaaggtgaaggaatcgtctacgaagcctgataaaaaggtttctgtcccatcaggacagattggtggccccattgctttgccctcagatcaccaaacaggaggcctgagtattggggcctcgagcagggagctcccatcccaggcatcgggcggccttgctaaccctcctcctgtcaacctggaggactcattggatgaagacttgatccgcaatccagcctcctcggtggaagccgtgtccaaggaattggctgcattgaatagcagagcagctgggaactctgaattcacactgcctgcaccctcaaaagcacctgcagaaaaagttggaggcgttttatgtacagaagaaaaaaggaactttgcgaagcctagtccttctgctccaccaccagctagctctctgcagtcacccctcaattttctggcagaacaggctctggcactggggcagtcctctcaggagaaaaaaccagagagttctggctacaaagagctgtcctgccaggctcccctcaataagggcctgccagaagtacatcagtccaaagctaagcaccacagcttgccacggacgtctcacgggccccaagtggcagttcctgtgcctggcccccaggtcaaagtctttcatgccggcactcagcagcagaaaaacttcacgcccccatctccatttgccaataagctccaaggcccaaaggcttctcccacacagtgtcatcgttccctcctgcagttagtgaagacagcggccaaaggccagggcttccatccctctgcaccagccacctcaggaggcctgtcagcctccagcagcagctctcacaagaccccagcctcgtcctcttctgccctgagccatccagcaaagccacattcagtcagctctgcaggctcatcttacaagaataatccctttgccagctcaatctccaaacatggggtttcttctggcagctcttcctcgggaggaacaccagtccagagttctgtttctgggagcctggtccctggcatacagcctccctccgtgggacaggccaccagccgacccgtcccaagttcagcagggaaaaaaatgcctgtttcccagaagttgactctggtagcccctccaggcggtccaaacggagattccagtggtgggacccagggagtggcaaagttgctgacctcgccgtccctaaagccctctgcagttagtagtgtgacatcgtctacctccttgtcaaaaggagcgagtgggactgtgctgctggccggctcctctttgatggcttcaccctacaaatccagcagcccaaagctgtctggggccatgagctcgaactccttgggaattataacccctgtccctattcctgtccatgtgctctccttcagcgctgactcctctgccaaagcaggggtctccaaggatgccatcgtcacaggccctgcccccgggtccttccaccatggccttggccacagtcttctggctggcttgcactccagcccgccccatgcagcgcctctcccacacgctgcggtgcccacccatatcccgcagagtctgccaggtgcttctcagcttcacgggaaagggcctgctgtaccacggaaattgtgaccgcttcagagggcaaggcttgccacttgggtctggggttggaattcagaacgtgcaggtttttccagggtttaacattcactgcggccttttttgtcgtttggttttttcttggaggaggtgagtttttcagggaggttttttgggatttttgatgtgctctccagggagggagcccgggctctgtcgttaaggaggttaagatcttccgtgtctttgggttttagttttttcgtaaaaggtttttgagggggaagtttgggttt

SEQ ID NO: 5 - DNA, 792 bp, Homo sapiens
  CDS (185)..(400)
agggaaatttgaagcctgtacgcctgcaggtaccggtccggaattcccgggtcgacccacgcgtccgcactctgtcacccagtctggagcgcagtggtgtgatcacagctcactgcagcctctacttcctgggatcaagtaattctcctgccccagcctccaatgtagctgggactacaggtgcatgacaccatgtctggctaatttgtttttttttaaactagagggagggttttgccatgttgcccagactagtctcaaactcctaggttcaagcagtcctttcatcttggcctccagaagtactgggattacaggcatgaaccaccatgcccagccaacttctaaactgatcaatatgggagtagcattcaatcacccacaggttaactcactctagagagaaatcttgtgagtgtaatttgtatggtaaaactttgagctcaaactttccccctaccaaaaaaaaagtatctactggggagctgcccaggtaatgcagtagctgtaggaaagccttcagtgatggcttcagggagtcacatgacaactcacaataaggggaaaccctgtgtgtggcatcaaaaatggaaaaccaggggacactcattccttaagtcacatttcggagatcatacaacagaggaatatgttgagtatacacagtgttgaaaagcctgtgacacaaacagtcatattaccaagcacaagacagtatagtttggtatgctataaaagccttgaatattctctccatttctcgtgccgaattcttggcctcgagggccaaat

SEQ ID NO: 6 - DNA, 858 bp, Homo sapiens
  CDS (175)..(858)
tacgcctgacgtaccggtccggaattcccgggtcgacgatttcctgtcctggaggaagaacggcacagacggagggaggctggggttggcagagactgggacggaagtccctcagtcccccaggagcctccttcatggacccggggatcccaagaggggctgcctcaacttaggatgggcaactgtgtcaagtatccactgagaaatctctcaaggaagatgtgccaggaggaacagaccagctacatggtggtgcagacgagcgaggaggggctggcggctgacgccgagctcccgggaccgctcctgatgctggcccagaactgcgcagtcatgcacaacctgctgggccctgcctgcattttcctgcgcaagggcttcgctgagaacaggcagcctgatagatcactgcgaccagaggaaattgaagagctccgagaggccttcagagaattcgacaaggacaaggatggctacatcaactgccgggatctgggcaactggatgcgcaccatgggctacatgcccaccgagatggagctcatcgaactgtcccagcagatcaacatgaacctgggtggccatgtagattttgatgacttcgtggagctaatggggcctaaactcctggcagagacagcagatatgattggtgtaaaggaactgcgagatgctttccgagagtttgacaccaatggtgatggggaaataagcaccagtgagctgcgagaggctatgaggaagctcctgggtcatcaggtgggacaccgagacatagaggaaattatccgagatgtggacctcaatggggatggacgagtggactttgaagagtttgtccggatgatgtcccgctga

SEQ ID NO: 7 - DNA, 1944 bp, Homo sapiens
  CDS (294)..(1088)
gagcccccccccttttgaccggcgtgatttatataagcatcgatgtatataactatctattcgatgatgaagataccccaccaaacccaaaaaaagagatctctcgaggatccgaattcgcggccgccgcgctcccagcatggctgtctctgcagtcgagggcaaggactctgcgtgcattctccactgccgtctactcggccactccggtcccgacacctagcctgccggaaagaacacccggaaatgaaaggccaccaagaagaaaggcactacctcctaggacagagaaaatggctgttgaccaggactggcctagtgtttacccagttgcagcaccatttaaaccctctgcagtacctcttcctgttcgaatgggttatccagtaaaaaagggcgtgcccatggcaaaggagggaaatctagaacttttaaagattcccaattttctgcatttgactcctgtagcaattaaaaagcactgtgaagcccttaaagatttttgcactgagtggccagccgcactggacagtgacgagaaatgtgagaagcattttccaattgaaattgacagcactgattatgtttcatcaggaccatctgttcggaaccccagagcacgagtagtagtcttaagagtaaagctttccagtttgaatttagatgatcacgcaaagaagaaattaattaaacttgtaggagagcgatactgcaagaccacagatgtgcttaccatcaaaacagataggtgccctttaaggaggcagaattacgattatgcagtgtatctactaacagtgttataccatgagtcttggaatactgaagaatgggaaaaaagtaagactgaagcagacatggaagagtatatatgggaaaatagctcatcagaaagaaatatcctggaaacgcttctccagatgaaagctgctgagaaaaatatggaaataaataaagaagagctccttggtactaaagaaattgaagagtacaaaaagtctgttgttagtcttaaaaatgaggaggaaaatgaaaattccatttctcagtacaaagaatccgtgaagagactattaaatgtgacatgaattatggagtagaaaaatctgcttgatttattaattttatgatatatgtgatcagtatctaatttgatataaaattgaaaatgttaaaaaatcattttttttcctcagagttaaaattatttccctcatactaatgcttaatggcaatgattactccagagttttttaatttttacactggggcaatagactaggaggtctctgatttcttcttggtctaaagtgttttgattttatttctacataatagctttggtattcatgtatatacatgcatttaattgtgattttatcacctttcccatttctttccccacaagctggcatttcagtagttgcttttgaataatggttttggttacctgggaaggcaggcccagaacccatttccttgacttgcagttccgggctgtgttcacatgactgctgtctagctgatgcatttttcacatttgtcaactctggttagaaacaggtcctcaggagtattctctaacctgatattttctaaaaagatatgttgattcaactttgtttagcatcctactttctagattgtggggctcattttgccagggccaagctaccagaaaagtagaagtggagattacctggtatgtatctctctgggtgccccagttagagctgccacagctcaggaaaaagatgaggcataacgaccttgaatgtaattggagtaagtgacaaaataagaactaccctgggaaaccctgcattcaatgtagctgtcaattcagtatttttaagtacacctgtcagctgtttcttaccacttcgatggttgtgattaatttaaaatcaaaataaaggaattactgagtttaaaaaaaaaaaa

SEQ ID NO: 8 - DNA, 1288 bp, Homo sapiens
  CDS (37)..(750)
gcccggaattcccgggtcgacgatttcgtcgggaagatggcggcctccaggaatgggtttgaagccgtggaggcagagggcagcgcagggtgccggggaagctcgggaatggaggtggtgcttcctttggatcctgccgtccccgccccgctgtgccctcacggacccactcttctgtttgtaaaggtgacccaagggaaagaagaaactcggaggttttatgcctgttcagcctgtagagatagaaaagactgtaatttttttcagtgggaagatgaaaagttgtcaggagctagacttgctgcccgagaagctcataaccgaagatgtcagcctcccctgtcccgaacgcagtgtgtggaaaggtacttgaagtttattgagttgcccttgactcagagaaagttttgtcaaacatgtcagcagttgttgttaccagatgactgggggcaacatagtgagcatcaggttctgggtaatgtgtccattacccagttaagaaggcccagtcaactcctttatccactggaaaacaagaagacaaatgcccagtatctgtttgctgatcggagctgtcagttcttggtagacttactttctgccctcggattcagaagagtactgtgtgttggaacaccaaggttgcatgagctgatcaagttgacagcatcaggtgacaagaagtctaacattaaaagccttttattggatattgattttcggtattcacagtttttatatggaagatagcttttgccattataatatgtttaaccatcatttctttgatggaaagactgcccttgaagtatgcagagcatttttacaggaagataaaggcgaaggaatcattatggtgacggatcctccgtttggtggcttggttgaacctctggctattacattcaagaagttaattgctatgtggaaagaaggtcaaagccaagatgacagtcacaaagaactacccattttctggattttcccctatttttttgaatcccgaatttgtcagttttttccaagcttccagatgctggattaccaggtagattatgataatcatgcactttataaacacgccgagaccggtcggcgacagtctcccgggcgtagtttcaccggcatttcgcccaacaaaataatccttcctactgaagaagggtacagattttgctctccgtgtcaaggtaatgtttctctagagaatcaacactgtgagcactgtaattcttgcacatccaaggatggcaggaaatggaaccattgctttatctgtaaaaaaaaa

SEQ ID NO: 9 - DNA, 917 bp, Homo sapiens
  CDS (133)..(651)
  misc_feature (1)...(917): n = a,t,c or g
catcgacccccntgactgatgctctcggagacccaagctggctagcgtttaaacttaagcttggtaccgagctcggatccactagtccagtgtggtggaattcggcgtctccgtgaggaggcgcgcggggccatgacgtcagcgtccacaaaggtcggagagatcttctcggcggccggcgccgccttcacgaagctcggggagctgacgatgcagctgcatcccgtggccgactcttctcctgcgggcgcgaagtggacggagacggaaatagagatgctgagggctgctgtgaagcgatttggggacgatcttaatcacatcagctgtgtcatcaaggaacggacagtggcccagataaaggccactgtgaaacgcaaggtatatgaagattctggcatcccccttccagctgagtcacccaagaaagggcccaagaaggtggcatctggtgtcttgtcacctcctccagctgcccctcctcccagcagctccagtgtccctgaggccgggggtccccccataaagaaacagaaggctgatgtgacactcagtgctctgaacgactccgatgccaacagtgacgtggtggatattgaagggctaggagaaactcctccagctaagaaactcaacttcgaccaggcctgaccctggattctggccttctcatgacctctgctgatcctcctctcctctcctgctgagccttccacctctgacctctcactgttcatgccggacctgtggatctcctgggactccgagcaaggcctgcacgagagagggctgaaaggctgctggggctgccacctcgctattcccgcataagcatctgcccccaacccctttgaccttcatctgatggacatttttatacagaaaacaataaagatttccctctcaaaaaaaaaaaa

SEQ ID NO: 10 - DNA, 1252 bp, Homo sapiens
  CDS (706)..(942)
gcacgagggatggcttggggcatgggaggggccagggagggaacctagtgcaggtgtgagctgccagtgttgcagacccatcacaaacctccccctcaaagaaagcacatccgcctggcagagctcctaagcctcgagcagctgccaggagactcatttcaattaggacacatgtctggaggccaccccaaggtggctgggggcagagtgaggcaggaggccctgcaattccagggttgcccaggcactgagaatcctggctctcatcataatgggctgaggttctggggacaatctgagtggcggctctgagcaagctgagcccagggaggctttgaggtacacagggtcccttggggggcctgagagcagccatgaggaggcacagtgagacagatgtggaagagcagacccaggagctgaagaccatcactcagctccagggtgagcctgcaccgccgtgaccagtctccctttcccgtctgggggtttctgggtgcacaactttttgtggggaaaagagagatcagattgttactgtctatgtagaaaaggaagacataagaaactccattttgatctgtactaagaaaaattgtttctgctttgagatgctattaacctgtaactttagccccaactctgtgctcacagaaacatgtgctgtattgaatcaaagattaatgcatttaggggccgtgcaggatgtgctttgttaacaatgtgtttgcaggcagtatgcttggtaaaagtcatccccatcctccattcttgattaaccagggacacagtgcactgcagaaagccgcagggacctctgcccaggaaagcctgggaattgtccaaggtttccccccactgagacagcctgagatatggcctcgtgggaaaggaaagatcttaccatcccccagcccgacaccagtaaagggtctgtgctgaggagtagtgaaagagggaggcctctttgcagttgagataagaggaaggcatctgtctcctgctcgtccctgggaatggaatgtctcagtgtaaagccgaccattcccattcgttctattctaagataggagaaaaccgctctgtggctagaggcaagatatgctggcagcaatactgctctgttactctttgctacactgagatgtttgtgtaacgtgaaacaaatctggcctacgtgcacatctgggcatagtacctttccttgaacttattcatgataaagattcctttgctcaaaaaaaaaaaaaaa

SEQ ID NO: 11 - DNA, 1486 bp, Homo sapiens
  CDS (219)..(953)
  misc_feature (1)...(1486): n = a,t,c or g
atttggccctcgaggccaagaattcggcacgaggcggttgactgtagagccgctctctctcactggcacagcgaggttttgctcagcccttgtctcgggaccgcaggtacgtgcctggcgacttcttcgggtggtccccgtccgccctcctcgtccctacccagtttcttgcttccctgccccatctccgccgctccccgcagcctccgccgagcgccatggctcctaggaagggcagtagtcgggtggccaagaccaactccttacggaggcggaagctcgcctcctttctgaaagacttcgaccgtgaagtggaaatacgaatcaagcaaattgagtcagacaggcagaacctcctcaaggaggtggataacctctacaacatcgagatcctgcggctccccaaggctctgcgcgagatgaactggcttgactacttcgcccttggaggaaacaaacaggccctggaagaggcggcaacagctgacctggatatcaccgaaataaacaaactaacagcagaagctattcagacacccctgaaatctgccaaaacacgaaaggtaatacaggtagatgaaatgatagtggaagaggaagaagaagaagaaaatgaacgtaagaatcttcaaactgcaagagtcaaaaggtgtcctccatccaagaagagaactcagtccatacaaggaaaaggaaaagggaaaaggtcaagccgtgctaacactgttaccccagccgtgggccgattggaggtgtccatggtcaaaccaactccaggcctgacacccaggtttgactcaagggtcttcaagacccctggcctgcgtactccagcagcaggagagcggatttacaacatctcagggaatggcagccctcttgctgacagcaaagagatcttcctcactgtgccagtgggcggcggagagagccctgcgattattggccagtgacttgcagaggcacagtattgcccagctggatccagaggccttgggaaacattaagaagctctccaaccgtctcgcccaaatctgcagcagcatacggacccacaaatgagacaccaaagttgacaggatggacttttaatgggcacttctgggaccctgaagagacttcttcccttcaggcttattgtttgagtgtgaagttccagagcaaggagccatgttcctctaagggaattcaggaattcagacgtgctattcccacaccagttaggtagagctgtctgttcaccctcccatcccagctgatcccagtcactgcttgctggggccatgccatggaagcttcccatcagtctcccagctgaatcctccctgctctctgagctgctgccttttgcctcctgcgtcgacgcggccgcgaattcggatcctcgagagatctctttttttgggtttggtggggtatcttcatcatcgaatagatagttatatacatcagcnggtcgatgggcggtccgatgaggggacagtcg

SEQ ID NO: 12 - DNA, 4365 bp, Homo sapiens
  CDS (106)..(1578)
aatgaaaatgaggcctatagggagacccaagctggctagcgtttaaacttaagcttggtaccgagctcggatccactagtccagtgtggtggaattcgaaacaagatggaggattcggcctcggcctcgctgtcttctgcagccgctactggaacctccacctcgactccagcggccccgacagcacggaagcagctggataaagaacaggttagaaaggcagtggacgctctcttgacgcattgcaagtccaggaaaaacaattatgggttgcttttgaatgagaatgaaagtttatttttaatggtggtattatggaaaattccaagtaaagaactgagggtcagattgaccttgcctcatagtattcgatcagattcagaagatatctgtttatttacgaaggatgaacccaattcaactcctgaaaagacagaacagttttatagaaagcttttaaacaagcatggaattaaaaccgtttctcagattatctccctccaaactctaaagaaggaatataaatcctatgaagccaagctccgccttctgagcagttttgatttcttccttactgatgacagaattaggcggctcttaccctcactcattgggagacatttctatcaaagaaagaaagttccagtatctgtaaaccttctgtccaagaatttatcaagagagatcaatgactgtataggtggaacggtcttaaacatttctaaaagtggttcttgcagtgctatacgtattggtcacgttggaatgcaaattgagcacatcattgaaaacattgttgctgtcaccaaaggactttcagaaaaattgccagagaagtgggagagcgtgaaactcctgtttgtgaaaactgagaaatcggctgcacttcccatcttttcctcgtttgtcagcaattgggatgaagccaccaaaagatctttgcttaataagaagaaaaaagaggcaaggagaaaacgaagagaaagaaattttgaaaaacaaaaggagaggaagaagaagaggcagcaggctaggaagactgcatcagttcttagtaaagatgatgtggcacctgaaagtggtgatactacagtgaagaaacctgaatcaaagaaggaacagaccccagagcatgggaagaaaaaacgtggcagaggaaaagcccaagttaaagcaacaaatgaatccgaagacgaaatcccacagctggtaccaataggaaagaagactccagctaatgaaaaagtagagattcaaaaacatgccacaggaaagaagtctccagcaaagagtcctaatcccagcacacctcgtgggaagaaaagaaaggctttgccagcatctgagaccccaaaagctgcagagtctgagaccccagggaaaagcccagagaagaagccaaaaatcaaagaagaggcagtgaaggaaaaaagtccttcgctggggaaaaaagatgcgagacagactccaaaaaagccagaggccaagtttttcaccactcctagtaaatctgtgagaaaagcttcccacacccccaaaaaatggcccaaaaaacccaaagtaccccagtcgacctaaagtcagtgattcaactggaaggaaacctcaatgctgcctccagagctttttggaaatactcagatcctggccgcctttgtaaccttctctaaacgtcaggcctggacttaaaagattttttaaaacctccataagtagtccaggggcggtggctcacgcctgtaatcccagcactttgggaggccgaggcaggcggatcacaaggtcaacgagatcgagaccatcctggccaacatggtgaaaccctgtctgtaccaaaaatacaaaaattaattgggcatggtggtggacacctgtaatcccagctactagggaggctgaggcaggagaattgcttgaacctgggaggcggaggttgcagtgaggcgagatcgtgccactgcactccagcctgggggagccaagcagacggaaagtgagggtagggtctctcagctcctgtagcagctgatccgagcctagagcccacacctgcactccatgcttccagaaggcctgaagctgacctccaaccatagccacggcctccaccgcttcggtcatggggatctcaggtgtgcgaagtccccggactggggacccctccggggtcaccagcttcacagagccatccatcaacaccatcaccatatcttcctctacctgggtcacctgcacgggtcccctgtgctcggtgctcatctcgcccagccagcaagagagcgcgccaaagcgcaccgtgtggaagagcaccgacttccccggccgcccggggctcacgccgatgcacacagcgggcagctcagagcctggcccggtcagcagcgcgaacacggacagaggcgtcggcagtgggaacagcacctgccggacaagcaggaatttgttcatgggctggtaccactgaagcaggacaacggacgtctccaatgcaccgcacaggaacgggcccccagagctcgcaccctccgccacacagcacgcccggcagcctttggtgtcctggatcttggtggaaaccatgttcttccttgccagtaggcggtgggggctaatgtgagcgatggggtttcctgctctggtctctttccgttccagcaggccaaggatgctatgagaatacaggtggggggtctttcctgagagagacatgagaacgttgttgatggagtacacccacgtagtccggctaggaaagagcatttccagcgtggcctcctggtcattccggttcaggatgaagatgccttcctctgcccccaggagcaggtgctggtccttggtggagggatgtgtccaggcggccgtgctgtggatccggagggggcagccattgaacaactttacgagaagggcacatccctttctcttcatcttttccttcttggggggcagaagtgggggcttgtcaagctcccgggagggtgggttccagagtgagggttctgaatgggcggtgaggtgggggctgctggtggatgggggaggcccaggacgggggctgtttggtgggggcccactggcacaccggaccagcacccccgggctcagctgcccatcatcccccatgctcccaggaccctcgtctgatggagaacggaacttgggcttggggggaagtggaggaggtgtgtcctctgcaggggtggggatgtccacgtcgtcatagtcatcgtcagacgactctgacagttgcttcctggggctgctgctcctgaggtctcgaggaggctgtaggcgagcggtgttggctgggggtctggtctccattcctcggagcttcctgaactccatgtgccgccgacagcagtctgcatctgggatccccagagagctggagcggtgggtggatctgatccgccgagggatagcagggggtagctcgggctcctcatcctcaatgtccccaatggagggtcctttcccgggattcttcagtttgtcaagaagatccaggatcaggcctcgattcagcccaggctgggataccagttgatgactgagcatcttggtggcgctgggtcgtttcttgggactcttagtcagagtgactttgatgaagttgtggaaggcagccgaccatttgcctttttccttcagtcggggaggctggtagccactcttggtcatgaggaagagaactctgagagggtgcacatcaaagagcggtggctgtagctcggccagttcgatggccgtgatgcccagggaccagatgtcacacagctcattgtatcctcccttcagggccacagctgccacttccggagccatccagtagggtgtcccaatgaaagagaggcgtctggccagtgtagccccaatctgggccgagatgccaaagtcagccaatctgacctccccagcatcattgatgaggatgttagctcccttgatgtccctgtgtatcttcttctgtgagtgcaaataggccagtccctggagcacttcccggcagacatagctaatctggagctctgacagggagcctgtcacttggtagatgtcctggagagaaccagccccacagaattccatgcagatccagagtttctgcaaccagagataactcccatggtaggccacgatgttggcgtgccggcaagttttcaatatgaggatttccttctgaagggtggagacatcatcatcaggctccatcttcaccatcttcagtgccaccaggtcccctgacaccttgtctcgagccttaaagacttccccatacgtgccgccacccagccgctgtagcaggtcatagtggtcccgggggtctctattgaaaatgtcagggtccacgacgtccat

SEQ ID NO: 13 - DNA, 1266 bp, Homo sapiens
  CDS (123)..(1097)
aattggaagcttgaaggccgttacgcctgcacgtaccggtccggaattcccgggtcgacccacgcgtccggaactggggtccggaggacgccccaggcctcttggccagggcctccctgatcatgctcccgtggccactacccctggcctcctcggccctcaccttgctcttcggggccctcacttccctgttcctctggtactgctaccgcctgggctcccaagacatgcaggccctaggggctgggagccgagctgggggtgttcgtggtgggcctgtgggatgctcggaggccggcgggccaagcccagggggtcctggggatcccggggaaggacctaggacggaaggcctagtgagccggcggcttcgggcctacgcaaggcgctactcctgggctgggatgggtagagtgaggcgggcagctcagggtggtggcccaggccctgggagagggccaggggtcctaggtattcagcgcccaggcctgcttttcctaccagacctgccttcagccccctttgtgccgcgggacgcccagcggcacgacgtggagctcctggagagcagcttccctgccattttgcgggacttcggggctgtgagctgggacttctcagggactacccctccgcctcggggctggtccccacctctggcccccgggtgctaccagctcctgctgtaccaagcaggccggtgccaacccagcaactgccgccggtgcccgggggcctatcgggcactgagggggcttcgaagctttatgagtgccaacaccttcggcaatgccggcttttccgttctcctgcctggggcccggctcgagggccgctgtgggcccaccaatgcccgggtcagatgccatctgggcctaaagatccctcctggctgtgagctggtggtcggcggtgagccccagtgctgggctgaggggcactgtctactggtggacgactcttttctacacacagtggctcacaatggctcccccgaagatgggcctcgagtggtcttcatcgtggacctctggcaccccaacgtggcaggggctgagcgccaggccctcgactttgtcttcgccccagacccttgaaggaaggtgctcccttcacacacccaggctggagagacactgcgctcagggacggcttgatggtagccaggacctcctctctactgcgggggtgggcgggggcggaggatgggaactggctagtgagcactgaaatataaattctgaatcctctcctaaaaaaaaaaaa

SEQ ID NO: 14 - DNA, 3029 bp, Homo sapiens
  CDS (251)..(2857)
tacagggtaaactgggtccaggtggcgtagccgccgcgacaccttcacgtgaccgcggacagcttaaggaaccccgcatccagtgcgcctgcgctggagctcccggaagttgccggacccggaacgcaggcggagcgcaagtctgtcagccagtcagtccgccagtccgccagcccagtacctctctctcctcggccctcgtaagctgtccgcggtctgtttggcccgaacggcggcggaggcgctgatcatggcgacattcatctcggtgcagctgaaaaagacctcagaggtggacctggccaagccgctggtgaagttcatccagcagacttacccaagcggcggggaagagcaggcccagtactgccgcgcggcggaggagctcagcaagctgcgccgcgccgcagtcggtcgtccgctggacaagcacgagggcgcgctcgagacgctcctgagatattatgatcagatttgttctattgaacccaaattcccattttctgaaaatcagatctgcttgacatttacctggaaggatgctttcgataaaggttcactttttggaggctctgtaaaactggctcttgcaagcttaggatatgaaaagagctgtgtgttgttcaattgtgcagccttagctagccaaattgcagcagaacagaacctggataatgatgaaggattgaaaatcgctgctaaacattaccagtttgctagtggtgcctttttacatattaaagagacggttttatctgccttaagtcgagagccgaccgtggacatatctccagatactgttgggaccctcagtcttattatgctggcacaggctcaagaagtattttttttaaaagccacaagagataaaatgaaagatgccatcatagctaaattggctaatcaggctgcagattattttggtgatgctttcaaacagtgtcaatacaaagatactctccccaaggaggtgttccctgtcttggctgcaaagcactgtatcatgcaggccaatgctgagtaccatcagtctatcctggcaaaacagcagaagaaatttggagaagaaattgcaaggttacagcatgcagcagaactgattaaaacagtggcatctcgctatgatgaatatgttaatgtgaaggatttttctgacaaaatcaatcgtgcccttgctgcagcaaagaaggataatgacttcatttatcatgatcgagttccagaccttaaagatctagatcctattggcaaagccacacttgtgaaatctaccccggtcaatgtacccatcagtcagaaatttactgatctgtttgagaagatggttcccgtgtcagtacagcagtctttggctgcctataatcagaggaaagccgatttgattaacagatcaattgctcagatgagagaagccaccactttggcaaatggggtgctagcttcccttaatcttccagcagcaattgaagatgtgtctggagacactgtacctcagtctatattgactaaatccagatctgtgattgaacagggaggcatccagactgttgatcagttgattaaagaactgcctgaattactgcaacgaaatagagaaatcctagatgagtcattaaggttgttggatgaagaagaagcaaccgataatgatttaagagcaaaatttaaggaacgttggcaaaggacaccatccaatgaactgtataagcctttaagagcagagggaaccaacttcagaacagttttagataaagctgtgcaggcagatggacaagtgaaagaatgttaccagtctcatcgtgacaccatcgtgcttttgtgtaagccagagcctgagctgaatgctgccatcccttctgctaatccagcaaagaccatgcagggcagtgaggttgtaaatgtcttaaaatccttattgtcaaatcttgatgaagtaaagaaggaaagagagggtctggagaatgacttgaaatctgtgaattttgacatgacaagcaagtttttgacagccctggctcaagatggtgtgataaatgaagaagctctttctgttactgaactagatcgagtctatggaggtcttacaactaaagtccaagaatctctaaagaaacaggagggacttcttaaaaatattcaggtctcacatcaggaattttcaaaaatgaaacaatctaataatgaagctaacttaagagaagaagttttgaagaatttagctactgcatatgacaactttgttgaacttgtagctaatttgaaggaaggcacaaagttttacaatgagttgactgaaatcctggtcaggttccagaacaaatgcagtgatatagtttttgcacggaagacagaaagagatgaactcttaaaggacttgcaacaaagcattgccagagaacctagtgctccttcaattcctacacctgcgtatcagtccttaccagcaggaggacatgcaccaactcctccaactccagcgccaagaaccatgccgcctactaagccccagcccccagccaggcctccaccacctgtgcttccagcaaatcgagctccttctgctactgctccatctccagtgggggctgggactgctgcgccagctccatcacaaacgcctggctcagctcctcctccacaggcgcagggaccaccctatcccacctatccaggatatcctgggtattgccaaatgcccatgcccatgggctataatccttatgcgtatggccagtataatatgccatatccaccagtgtatcaccagagtcctggacaggctccatacccgggaccccagcagccttcataccccttccctcagcccccacagcagtcttactatccacagcagtaatatgtctgctcagcagctcagctgattcagatcagagggaaagaaataccaaccctgcaataagtgtactaaactctacgctctggttaatgtaatgtactctcctggactgaatgcagtgtataatttctgtctacagctagaagctgtgccccagttccacatttgatta

SEQ ID NO: 15 - DNA, 2055 bp, Homo sapiens
  CDS (88)..(1929)
acgccgggctcgcgacggaaagtgccaagctaaaattaccctcactaaagggaataagcttgcggccgcggcgtcggggctggagcgatggcggcgaccgcggtggcggcggctgtggcgggaaccgagtcggcccagggtcccccgggcccggcagcgtcgctggagatctggctgaacaaagccacagacccaagcatgtcggaacaggattggtcagctatccagaatttctgtgagcaggtgaacactgaccccaatggccccacacatgcgccctggctactggcccacaagatccagtctccgcaagagaaggaagctctttatgccttaacggtgctggagatgtgcatgaaccactgtggggagaagttccacagcgaggtggccaaatttcgtttcctgaacgaactgatcaaagtgttgtccccaaagtacctggggtcctgggccacaggaaaagttaaaggaagagtcattgaaatactcttcagttggacagtctggtttccggaagacatcaagattcgagacgcttatcagatgctgaagaaacaaggaattataaaacaagaccctaaactaccagtggataaaatcttacccccaccatctccctggcccaagagctccatctttgatgctgatgaagaaaagtccaagcttctgacaaggcttctaaagagcaaccaccccgaggaccttcaggctgcaaaccggttaatcaagaatttggtcaaggaggaacaagaaaaatcggagaaggtgtccaagagggtcagtgcggtggaggaagtgcgaagccatgtgaaggtgctgcaggagatgctgagcatgtaccgcaggccagggcaggccccgcccgaccaggaggccctgcaggtcgtgtatgagaggtgtgaaaagctgcggcccacgctgttccggttggcgagtgacaccactgatgacgatgatgcactcgcggaaattctccaggcaaatgacctcctcacccaaggagttctgctgtacaaacaggtgatggagggccgggtcacctttggaaacagagtgaccagctcattgggagacatccctgtctccagagtctttcagaatccagcaggctgcatgaagacctgccccctgattgacttggaggtggacaatggacctgcgcagatggggactgtggtgccatctttgcttcatcaggacctggcagccttgggaatcagtgatgctcctgttacaggcatggtttctggtcagaattgctgtgaggaaaagaggaatccctcctccagcacgctgccaggcggtggtgttcagaacccttctgcagacaggaatttgctggacctcctctcaccacagccagctccgtgccctctgaattatgtttcgcagaaaagtgtccccaaggaagtgccaccaggtactaagtcctctccaggttggtcctgggaggctggcccgttggctccttccccatcttcacagaatacacctctggctcaagtgtttgtccctttggagtctgttaagcccagcagcctgccgcctctcattgtgtatgaccggaatggattcagaattctgctccacttctcccagacgggagcccctgggcacccagaggtacaggtgctgctcttgaccatgatgagcacggctccccagcctgtctgggatatcatgtttcaagtggctgtgccaaagtcaatgagagtgaagctgcagccggcatccagctccaagcttcctgcattcagtcctttgatgcctccagctgtgatatctcagatgctgctgcttgacaatccacacaaagaacctatccgcttacggtacaagctgacattcaaccaaggtggacagcctttcagcgaagtaggagaagtgaaagacttcccagacctggctgtcttgggcgcagcctaacttttcacaagatggacccttcatttcaagcttaggctggcgttacttttgctgtctagtcaggactaatcacggtgtttcagtgcggagtgccaagagtcctatcctgacgtcaaaaaaaaaaaa

SEQ ID NO: 16 - DNA, 793 bp, Homo sapiens
  CDS (43)..(756)
gacggccagtgaattgaatttaggtgacactatagaagagctatgacgtcgcatgcacgcgtacgtaagcttggatcctctagagcggccctactactactaaattcgcggccgctcgaccgccgagcgatgggcatctctcgggacaactggcacaagcgccgcaaaaccgggggcaagagaaagccctaccacaagaagcggaagtatgagttggggcgcccagctgccaacaccaagattggcccccgccgcatccacacagtccgtgtgcggggaggtaacaagaaataccgtgccctgaggttggacgtggggaatttctcctggggctcagagtgttgtactcgtaaaacaaggatcatcgatgttgtctacaatgcatctaataacgagctggttcgtaccaagaccctggtgaagaattgcatcgtgctcatcgacagcacaccgtaccgacagtggtacgagtcccactatgcgctgcccctgggccgcaagaagggagccaagctgactcctgaggaagaagagattttaaacaaaaaacgatctaaaaaaattcagaagaaatatgatgaaaggaaaaagaatgccaaaatcagcagtctcctggaggagcagttccagcagggcaagcttcttgcgtgcatcgcttcaaggccgggacagtgtggccgagcagatggctatgtgctagagggcaaagagttggagttctatcttaggaaaatcaaggcccgcaaaggcaaataaatccttgttttgtcttcacccatgtaaaaaaaaaaaa

SEQ ID NO: 17 - DNA, 2045 bp, Homo sapiens
  CDS (97)..(1686)
gccctccgtggacaattgtgttgaagcagaaattgttccggatctcgggtcggacacggaagtcttcctgcagtgtttctggatgcggggacagggatgcgcaggaattccagtctcagtttccagatggagcgacccctcgaggagcaagtccagagcaagtggtcgtctagtcaaggccgcacaggaacaggagggtctgatgtcctccagatgcagaacagtgaacaccatggacaaagcatcaagactcaaactgactccatctcccttgaggatgtggctgtgaacttcaccctggaggagtgggctttgctggatcctggccagaggaatatctacagagatgtgatgcgggcaaccttcaagaacctggcctgtataggggaaaaatggaaagaccaggatattgaagatgaacacaaaaaccagggaagaaatctaagaagtcctatggttgaagcactctgtgaaaataaagaagattgtccatgtggaaaaagcactagccagattcctgatcttaatacgaacctggaaactcctactggattaaaaccatgtgactgcagtgtgtgtggggaagtcttcatgcatcaggtctcccttaataggcacatgagatctcacactgaacagaaaccaaatgagtgtcacgaatatggagagaagccacataaatgcaaagaatgtgggaaaaccttcactcgcagctccagtattcgaacccatgaaagaattcacactggagagaaaccctatgaatgtaaggaatgtggcaaagccttcgcatttctcttttcctttcgaaaccatataagaattcatactggagagacaccctatgaatgtaaggaatgtgggaaggcattcagatatctcactgctcttcggcgccatgaaaaaaatcacactggagagaaaccctacaaatgtaaacagtgtggaaaagcctttatatattaccagccttttctaacccacgaaaggactcacactggagagaaaccttatgaatgtaagcaatgtgggaaagccttcagttgtcccacgtacttacggagtcatgagaaaactcatactggagagaaaccttttgtatgtagggaatgtgggagagccttcttttctcactcaagccttcgaaaacacgtgaaaacccacaccggagttcaaccttatacatgtaagaaatgtggggaagccttcaagtcatctagttcctgtgaagtgcacgaaagaactcattttggagaaaaaccctatgaatgtaaacaatgtggtaaagccttcaattcttcaagttaccttcagttgcacgaaagagttcacactggcgagaaaacttacgaatgtaaagaatgtggtaaagcctttctttattccactcactttcgaatccatgaaagaacccatactagagagaaaccctatgaatgcaaacagtgtggtcgggtcttcatttacttcagtcaccttcgaaggcacgaaagaagtcacactggagtgaaaccatgtgagtgtaagcagtgtggcaaagctttcacttgtttaaattccctgaaagtacacaaaagaattcatactggagaaagaccctttcagtgtagacaatgtggtaaagccttcagttactcaaagtctttgcacgtgcacgaaaggactcatagtagacagaagccctaagaaagtaaagtgtggtaatgctgtcagttgtattagttccttttggatgtatgagagtacttacgctggagagaaattcaaggaatgtaaacggtgtgattaagccttcagttgtcctaattccctttgaagacgtgactcatgcggcaatgaaatatttaacaaatgggggaggaacttgcactctcctgcgggattgcagatacgtgaatggactccatggacagaaaagctacgaatgtatggagtgtaggaaagccttcacttcacgtaatcttttaaagacacctgagaatatatactggagagaaactataaagaaaattctatatccatcccatcttttgtggagtttggtt

SEQ ID NO: 18 - DNA, 1557 bp, Homo sapiens
  CDS (92)..(1381)
ccggaattcccgggtcgacccacgcgtccgggctcctgctacctccctttccggcacccttcagagggaccctcagtctggccttgcaagcatggactcttctgaggagcacgctgggtgccccgcccgagggacatgtcccgtgttcctggccatgagtgcagggactgtccgctacgccccatcaggcctgtgccctgtacttgaggggaacttgagagaagagccctggggcacagacagcccaccccagccagaccagggcctcccgccgccccttgcagctgtcccggtcccctggaagagcacggacccctgccaaggccacagggagtccccaggagccctggtggagacctctgcaggggaggaggcccaaggccaggagggccccgcagccgcccagctggacgtgttgcgcctgcgcagctcttccatggagatccgagagaagggctccgagttcctgaaggaggagctgcacagagcgcagaaggagctgaagctaaaggacgaggaatgtgagcggctgtccaaggtgcgggagcagctagaacaggagctggaagagctgacggccagcctgtttgaggaagctcacaagatggttcgagaagccaacatgaagcaggcggcatcagaaaagcagctgaaggaggctcggggcaagatcgacatgctgcaggcagaggtgacagccttgaagacgctggtcatcacgtccacaccagcctctcccaaccgcgagcttcacccccagctgctgagccccaccaaggccgggccccgaaagggccactctcgccacaagagcaccagcagcaccctctgccccgccgtgtgtcccgctgcgggacacaccctcaccccatacagagagggcaaggaggtggacacaatcctgtttgcagagttccaggcctggagggaatcccccaccctggacaagacctgccccttcctggaaagggtgtaccgagaggacgtgggcccctgcctggacttcacaatgcaggagctctcggtgctggtacgggccgccgtggaggacaacacgcccaccattgagccggtggcttcgcagacgctgcccacagtgaaggtggccgaggttgactgtagcagcaccaacacatgtgccctgagcgggctgacccgcacctgccgccaccgaatccggctcggggactccaaaagccattactacatctcgccatcttcccgggccaggatcaccgcagtgtgcaacttcttcacctacatccgctacatccagcaaggcctggtgcggcaggacgcagagcccatgttctgggagatcatgaggttgcggaaggagatgtcactggccaagctcggcttcttcccccaggaggcttagggcgcggcccaggcctgaaggggagctctgagacagagcaaacacccaccccagaacaagccgacacacagggagacgggggcctggagccagccctgagccagaggcagaatggatggacagacaggccatggaggcagcactgagccagcaccacacgtccatcctgggacaga

SEQ ID NO: 19 - DNA, 1389 bp, Homo sapiens
  CDS (206)..(568)
aggacctactagcaactaaaagggagcgttgagcgtaaagggaactagcttgcggccgcaaatctttttttttttttttttttgtcgatttgatcttcttttttgagagtcttgatcttttaatgtatgctgtggcatctgttctgcatcagatatttcatctgaagactcattctttcttttttgtttcttacccaatgtaataatgagtttgccaatttttgtcttctcttttaacttagaacatgtttttgtttttttgctgtctttgtcctttggcttggatttcatccttctacctttcttttcctcttttccttcaactgaagcagtaggaaagttttcagggctcattactcgtggaatattgcgttccccacgctcctttgcttttgctatggcctctgatattatacgattagccttttcttgcttgctttctgattccaccttttttctctgcttcttctcagacatgaccctcacctgggtattctgcaacttagtatatgtcccagaaccatcgctcttcttggaagatggaggctgtcgctgtaaacataggtgatttctgtcatgtaaatgctgatgattagaaaatgatgaatgccaactccgagcctgactttgcaactgagtctgagccatatcagaaggccgtgttaccagatgcgaagtaaactgccgatcaaggtcatgatctaaaatgtgacttgaattatcttgtccgaatgttgactcatcaaagtgaggaagaagaccctcctgaaggaggtcctcggggtcaagtcctgtgaatggctcagtttgagattccacttgatgaagtaaattctcttctaaagatgaaaagccattagtttctacatgatcattgaaatggcccatttgagttcctgagtcaacaggatctgggaagttcatgtgcacaggagataattttgaattgctataattaccctgaggatgtgatgaatgcaatatttggaaattatttgaattcaatgatgtattggggtttaggatatgctgagtagattcttgcttgattcctctatgaggtgaaaaggaattacttccagtaaaatcagataaagtctgatttgtatgattagatgcaagaactgcagaggactgaagtagactgtttggtgatatatgattactggaaaaggaataatgtgaagaaaattgctgtgaattactgacagaacaagaagtcatatttggggaaggtccattaaaatttccttcttgatgactgctacacttgtggaagtgtgctgaaggatttgacgtttgagaaaattgctgcattgaaatagactgttgtgaattagatgcattagtcatctgctcgtgccgaattcttggcctcgagggccaaat

SEQ ID NO: 20 - DNA, 1456 bp, Homo sapiens
  CDS (217)..(1320)
atttggccctcgaggccaagaattcggcacgaggagccaggagcgagtgggtgacaggtcattggtgactggggaggttgcttgacaagtcaggattgtgcctccagtcagaaggaccatgaagagagagaagagggcagagccgtgcatggggctgctccccaggacctgagcaggaacctggagttttcagagctgcctgatcattgctacagaatgaactctagcccagctgggaccccaagtccacagccctccagggccaatgggaacatcaacctggggccttcagccaacccaaatgcccagcccacggacttcgacttcctcaaagtcatcggcaaagggaactacgggaaggtcctactggccaagcgcaagtctgatggggcgttctatgcagtgaaggtactacagaaaaagtccatcttaaagaagaaagagcagagccacatcatggcagagcgcagtgtgcttctgaagaacgtgcggcaccccttcctcgtgggcctgcgctactccttccagacacctgagaagctctacttcgtgctcgactatgtcaacgggggagagctcttcttccacctgcagcgggagcgccggttcctggagccccgggccaggttctacgctgctgaggtggccagcgccattggctacctgcactccctcaacatcatttacagggatctgaaaccagagaacattctcttggactgccagggacacgtggtgctgacggattttggcctctgcaaggaaggtgtagagcctgaagacaccacatccacattctgtggtacccctgagtacttggcacctgaagtgcttcggaaagagccttatgatcgagcagtggactggtggtgcttgggggcagtcctctacgagatgctccatggcctgccgcccttctacagccaagatgtatcccagatgtatgagaacattctgcaccagccgctacagatccccggaggccggacagtggccgcctgtgacctcctgcaaagccttctccacaaggaccagaggcagcggctgggctccaaagcagactttcttgagattaagaaccatgtattcttcagccccataaactgggatgacctgtaccacaagaggctaactccacccttcaacccaaatgtgacaggacctgctgacttgaagcattttgacccagagttcacccaggaagctgtgtccaagtccattggctgtacccctgacactgtggccagcagctctggggcctcaagtgcattcctgggattttcttatgcgccagaggatgatgacatcttggattgctagaagagaaggacctgtgaaactactgaggccagctggtattagtaaggaattaccttcagctgctaggaagagctgtattgcggccgctctagaggatccaagcttacgtacgcgtgcatgcgaaatggtactcgat

SEQ ID NO: 21 - DNA, 7827 bp, Homo sapiens
  CDS (121)..(7497)
ccattcccaagctggctagcgtatagatttccgtttggtaccgagctcggatccactagtccagtgtggtggaattcgagacatgtgactttaccctcttcccctcgaagcaacactccaatgggagacaaggatgatgatgacgatgatgatgcagatgagaaaatgcagtcatcagggatcccgaatggtggtcacatccgtcaggaaagccaggaacagagtgaggtggaccatggagattttgagatggtgtctgagtcgatggtcctggagacagctgaaaatgtcaacaatggcaacccctctcccctggaggccctgctggcaggcgcagagggcttcccccccatgctggacatcccacctgatgcagatgacgagaccatggttgaactagccattgccctgagcctgcagcaggaccaacaaggcagcagcagcagtgccctgggcctgcagagcctgggactgtccggccaggcacccagctcttcctctctggacgcaggaaccctctctgacaccacagcatcagctccagcctcagacgacgagggcagtacagcagcgacagatggttctacccttcggacctctcctgctgaccacggtggtagtgtgggctcggagagcgggggcagtgcagtggactcagtggctggcgagcacagtgtatctggccggagcagtgcttatggcgatgctacagctgaggggcatccggctggaccaggaagtgtcagctcaagcactggagccatcagcaccaccactgggcaccaggagggagatggctccgagggagaaggagaaggagaaactgaaggagatgtccacactagcaacaggctgcacatggtccgtctaatgctgttggagagattactgcagaccctgcctcaattacgaaacgttggcggtgtccgggccatcccatacatgcaggtcattctaatgctcactacagatctggatggagaagatgagaaagacaagggggccctagacaacctgctctcccagcttattgctgagttgggtatggataaaaaggatgtctccaagaagaatgagcgcagcgccctgaatgaagtccatctggtagtaatgagactcctgagtgtcttcatgtcccgcaccaaatctggatccaagtcttccatatgtgagtcatcttccctcatctccagtgccacagcagcagctctactgagctctggggctgtggactactgcctgcacgtgctcaaatcactgctggaatattggaagagccaacagaatgacgaggagcctgtggctaccagccagttgctgaaaccacatactacctcctccccacctgacatgagcccattctttctccgccagtatgtgaagggtcatgctgctgatgtgtttgaggcctatactcagcttctaacagaaatggtactgaggcttccttaccaaatcaaaaagattactgacaccaattctcgaatcccacctcctgtctttgaccactcgtggttttactttctctccgagtacctcatgatccagcagactccatttgtgcgccgtcaagtccgcaaacttctgctcttcatctgtggatccaaagagaagtaccgccagctccgggatttgcacaccctggactctcacgtgcgtgggatcaagaagctgctagaagagcaggggatattcctccgggcaagtgtggttacagccagctcaggctccgccttgcaatatgacacactcatcagcctgatggagcacctgaaagcctgtgcagagattgccgcccagcgaaccatcaactggcagaaattctgcatcaaagatgactccgtcctgtacttcctcctccaagtcagtttccttgtggatgagggcgtgtccccagtgctgctgcaactgctctcctgtgctctgtgcggcagcaaggtgctcgctgcactggcagcctcttcgggatcctccagtgcttcttcctcctcagcccctgtggctgccagttctggacaagccacaacacagtccaagtcttccactaaaaagagcaagaaagaagaaaaagaaaaggagaaagatggtgagacctctggcagccaggaggaccagctgtgcacagctctggtgaaccagctgaacaaatttgccgataaggaaaccctgatccagttcctgcgttgtttcctgttagagtccaattcttcctcggtgcgctggcaggcccactgtctgacactgcacatctacagaaattccagcaaatctcaacaggagctcctgctagatctgatgtggtccatctggccagaactcccagcctatggtcgtaaggctgcccagtttgtggacctactaggatatttctccctgaaaactccacaaacagagaagaagttgaaggagtattcacagaaggctgtggagattctgcggactcaaaaccatattcttaccaaccaccccaactcgaacatttataacactttgtctggcttagtggagtttgatggctattacctggagagcgatccctgcctggtgtgtaataacccggaagtaccgttctgttatatcaagctgtcttccattaaagtggacacgcggtacaccaccacccagcaggttgtgaagctcattggcagtcacaccatcagcaaagtgacagtgaaaatcggggatctgaaacggaccaagatggtgcggaccatcaacctgtattataacaaccgaaccgtgcaggccatcgtggagttgaaaaacaagccagctcgctggcacaaagccaagaaggttcagctgacccctggacagacagaggtgaagattgacctgccgttgcccattgtggcctccaatctgatgattgagtttgcagacttctatgaaaactaccaggcctccacagagaccctgcagtgccctcgctgtagtgcctcggtccctgccaacccaggagtctgtggcaactgtggagagaatgtgtaccagtgtcacaaatgcagatccatcaactacgatgaaaaggatcccttcctctgcaatgcctgtggcttctgtaaatatgcccgcttcgacttcatgctctatgccaagccttgctgtgcagtggatcccattgagaatgaagaagaccggaagaaggctgtatccaacatcaatacacttttggacaaagctgatcgagtgtatcatcagctgatgggacaccggccacagctggagaacctgctctgcaaagtgaatgaggcagctccagaaaagccacaggatgactcaggaacagcagggggcatcagctccacttctgccagtgtgaatcgttacatcctgcagttggctcaggagtattgtggagactgcaagaactcttttgatgaactctccaaaatcatccagaaagtctttgcttcgcgcaaagagttgttggaatatgacctacagcagagggaagcagccactaaatcatcccggacctccgtgcagcccacattcactgccagccagtaccgtgccttatccgtcctgggctgtggccacacatcctccaccaagtgctatggctgcgcctcggctgtcacagaacattgtatcacactacttcgggccctggccaccaacccagccttgaggcacatccttgtctcccagggccttatccgggagctctttgattataatcttcgccgaggggctgcggccatgcgggaggaggtccgccagctcatgtgcctcctaactcgagacaacccagaagccacccaacagatgaatgacctgattattggcaaggtctccacagccctgaagggccactgggccaaccccgatctggcaagtagcctgcagtatgaaatgctgctgctgacggattctatctccaaggaggacagctgctgggagctccggttacgctgtgctctcagccttttcctcatggctgtgaacattaagactcctgtggtggttgaaaacattaccctcatgtgcctgaggatcttgcagaagctgataaaaccacctgctcccactagcaagaagaacaaggatgtccccgttgaggccctcaccacggtgaagccatactgcaatgagatccatgcccaggctcaactgtggctcaagagagaccccaaggcatcctatgatgcctggaagaagtgtcttcctatcagagggatagatggcaatgggaaagcccccagcaaatcagagctccgccatctctatttgactgagaagtatgtgtggaggtggaaacagttcctgagtcgtcgggggaagaggacctcccccttggatctcaaactggggcataacaactggctgcgacaagtgcttttcactccagcaacgcaggccgcacggcaggcagcctgtaccattgtggaagctctagccaccattcccagccgcaagcagcaggtcctggacctgcttaccagttacctggatgagctgagcatagctggggagtgtgcagctgagtacctggctctctaccagaagctcatcacttctgcgcactggaaagtctacttggcagctcggggagtcctaccctatgtgggcaacctcatcaccaaggaaatagctcgtctgctggccctggaggaggctaccctgagtaccgatctgcagcagggttatgcccttaaaagtctcacaggccttctctcctcctttgttgaggtggaatccatcaaaagacattttaaaagtcgcttggtgggtactgtgctgaatggatacctgtgcttgcggaagctggtggtgcagaggaccaagctgatcgatgagacgcaggacatgctgctggagatgctggaggacatgaccacaggtacagaatcagaaaccaaggccttcatggctgtgtgcattgagacagccaagcgctacaatctggatgactaccggaccccggtgttcatcttcgagaggctctgcagcatcatttatcctgaggagaatgaagtcactgagttctttgtgaccctggagaaggatccccaacaagaagacttcttacagggcaggatgcctgggaacccgtatagcagcaatgagccaggcatcgggccgctgatgagggatataaagaacaagatttgccaggactgtgacttagtggccctcctggaagatgacagtggcatggagcttctagtgaacaataaaatcattagtttggaccttcctgtggctgaagtttacaagaaagtctggtgtaccacgaatgagggagagcccatgaggattgtttatcgtatgcgggggctgctgggcgatgccacagaggagttcattgagtccctggactctactacagatgaagaagaagatgaagaagaagtgtataaaatggctggtgtgatggcccagtgtgggggcctggaatgcatgcttaacagactcgcagggatcagagatttcaagcagggacgccaccttctaacagtgctactgaaattgttcagttactgcgtgaaggtgaaagtcaaccggcagcaactggtcaaactggaaatgaacaccttgaacgtcatgctggggaccctaaacctggcccttgtagctgaacaagaaagcaaggacagtgggggtgcagctgtggctgagcaggtgcttagcatcatggagatcattctagatgagtccaatgctgagcccctgagtgaggacaagggcaacctcctcctgacaggtgacaaggatcaactggtgatgctcttggaccagatcaacagcacctttgttcgctccaaccccagtgtgctccagggcctgcttcgcatcatcccgtacctttcctttggagaggtggagaaaatgcagatcttggtggagcgattcaaaccatactgcaactttgataaatatgatgaagatcacagtggtgatgataaagtcttcctggactgcttctgtaaaatagctgctggcatcaagaacaacagcaatgggcaccagctgaaggatctgattctccagaaggggatcacccagaatgcacttgactacatgaaaaagcacatccctagcgccaagaatttggatgccgacatctggaaaaagtttttgtctcgcccagccttgccatttatcctaaggctgcttcggggcctggccatccagcaccctggcacccaggttctgattggaactgattccatcccgaacctgcataagctggagcaggtgtccagtgatgagggcattgggaccttggcagagaacctgctggaagccctgcgggaacaccctgacgtaaacaagaagattgacgcagcccgcagggagacccgggcagagaagaaacgcatggccatggcaatgaggcagaaggccctgggcaccctgggcatgacgacaaatgaaaagggccaggtcgtgaccaagacagcactcctgaagcagatggaagagctgatcgaggagcctggcctcacgtgctgcatctgcagggagggatacaagttccagcccacaaaggtcctgggcatttataccttcacgaagcgggtagccttggaggagatggagaataagccccggaaacagcagggctacagcaccgtgtcccacttcaacattgtgcactacgactgccatctggctgccgtcaggttggctcgaggccgggaagagtgggagagtgccgccctgcagaatgccaacaccaagtgcaacgggctccttccggtctggggacctcatgtccctgaatcagcttttgccacttgcttggcaagacacaacacttacctccaggaatgtacaggccagcgggagcccacgtatcagctcaacatccatgacatcaaactgctcttcctgcgcttcgccatggagcagtcgttcagcgcagacactggcgggggcggccgggagagcaacatccacctgatcccgtacatcattcacactgtgctttacgtcctgaacacaacccgagcaacttcccgagaagagaagaacctccaaggctttctggaacagcccaaggagaagtgggtggagagtgcctttgaagtggacgggccctactatttcacagtcttggcccttcacatcctgccccctgagcagtggagagccacacgtgtggaaatcttgcggaggctgttggtgacctcgcaggctcgggcagtggctccaggtggagccaccaggctgacagataaggcagtgaaggactattccgcttaccgttcttcccttctcttttgggccctcgtcgatctcatttacaacatgtttaagaaggtgcctaccagtaacacagagggaggctggtcctgctctctcgctgagtacatccgccacaacgacatgcccatctacgaagctgccgacaaagccctgaaaaccttccaggaggagttcatgccagtggagaccttctcagagttcctcgatgtggccggtcttttatcagaaatcaccgatccagagagcttcctgaaggacctgttgaactcagtcccctgaccaccacacagcagctgcggcggcgaagacgaagctggcttgccttccaccctctgttctccctccttgtgcattaagttccctccgcgggatgctgcattgttaccccgccctcccctctctcatttttcttggtgtggcttggggtttttaggcttcctgttttatctcgtgtgtgtggtgcaccagctatgaggttgtctgtaacccaagccatcaaagggcctgtacatacctaggagccatgagttgtcccggccagcttcatacttgagtgtgcacatcttgagaaataaacaagtgacttaacacacattgaaaaaaaaaaaa

SEQ ID NO: 22 - DNA, 1745 bp, Homo sapiens
  CDS (1)..(1440)
atgaaagtgaggtcggccggcggcgatggagatgccttgtgcgttacagaagaggacctggcgggtgacgacgaggacatgccgaccttcccatgcacccagaagggccggccagggccccgctgcagccgctgccagaagaacctatctttgcacacatcggtgcggattctttacctcttcctggccctgctcctggtggccgtggctgtgttggcctctctggttttcagaaaagtggactctctctccgaagacatctccttgacccagtctatttatgacaagaagcttgtgttaatgcagaaaaatctccagggcctggatccgaaagccctgaacaactgctctttctgccatgaagctgggcagctggggccagagatccgaaaactgcaggaggagctggagggaattcagaagctgcttctggcccaggaggtgcagctggaccagaccttacaggcccaggaggtgctctccaccaccagcagacaaatctcccaggagatgggcagttgctccttctccatccaccaggttaaccagtctctggggctcttcctggcccaggtgagaggctggcaggccaccacagctggcctggacctctctctgaaggacctcacccaggagtgctacgatgtcaaggctgcagtgcaccagatcaacttcaccgtggggcagacttccgagtggatccacgggatccagcggaagacagacgaggagaccctgaccctccagaagattgtcaccgactggcagaactacacacggctcttcagcggcctgcgcaccacctccaccaagactggagaggcggtcaagaacatccaggccaccctgggggcctcctcacagcgcatcagccagaactcagagagcatgcacgacctggtactccaggtcatgggcttgcagctgcagctggataacatctcgtccttcctggatgaccacgaagagaacatgcatgatcttcagtaccatacccactacgcccagaaccgcactgtggagaggtttgagtctctggaaggacgcatggcttctcacgagattgaaattggcaccatcttcaccaacatcaatgccaccgacaaccacgtgcacagcatgctcaagtacctggatgacgtgcggctctcctgcacgctgggcttccacacccatgccgaggagctctactacctgaacaagtctgtctccatcatgctgggcaccacagacctgctccgggagcgcttcagcctgctcagtgcccggctggacctcaacgtccggaacctctccatgatcgtggaggagatgaaggcagtggacacacagcatggagaaatccttcgcaatgtcaccatcctacgaggaaacagaaacttggatctgcaagaaggagtggagagcagcagaagtggtaaattagaacgtaaatattaaaatgcatggatttttttctctctgaattctcttgagagacaactgactattgtaagggaagattattttaagactattttaagataagactggagattggatttataatgtgtcaagttgatatgacaacaagagcaccagggatagctaattgcaaatttaatggtggaagtctaaatgttttcccttataaaccagaaataaggcaaggatctcatctcccaacacttttattctatttgactagaggtcctccccaacattgtattgcggccgctctagaggatccaagcttacgtacgcgt

SEQ ID NO: 23 - DNA, 1867 bp, Homo sapiens
  CDS (244)..(1584)
cgtccggaattcccgggtcgacgatttcgtggcgtggagtttctctgagacaaacacaggaataccccgagataatgtgagcagtatctccaaagtccaggctgagtcatatggtaggtgctgtttggaatatctagcctgcctgccttgcagattcaaatgcctcgggcaggagggtgagctagctgccgatcctgctctgctcctgggtttgctgtgtggcccttggtagaacgtcatgacatgaataccttaagcctgcccctgaacatacgccgaggggggtcagacaccaacctcaactttgatgtcccggatggcatcctggacttccacaaggtcaaactcactgcagacagcctgaagcaaaaaattctaaaggtaacagagcagataaaaattgagcaaacatcgcgcgatgggaatgttgcggagtatctgaaactagtgaacaacgcagacaagcagcaggcgggacgtatcaagcaagtctttgagaagaagaatcagagggcagctcactccatcgcccagctgcagaagaagttagagcagtatcatcgaaagctcagagagatcgagcagaatggagcctctaggagctcaaaggacatttccaaagaccacctgaaggatatacatcgctctttgaaagatgcccacgtgaaatctcgaactgccccccattgcatggagagcagcaaatcgggcatgccaggggtctcacttactccacctgtgttcgttttcaataagtccagagagtttgccaacctgatccggaataagtttggcagcgccgacaacattgctcacttgaaaaattccttagaggagtttaggccagaggcgagtgccagggcctacgggggcagcgctaccatcgtgaacaaacccaagtatggcagtgatgatgaatgttcgagtggcacgtcaggctcggccgacagtaacggaaaccagtcgtttggggctggtggagccagcacactggacagccagggcaagctcgccgtgatcctggaggaactgagggagatcaaggatacccaagctcagctggctgaggacatcgaggcactgaaggtgcagtttaagagagaatatggttttatttctcagaccctgcaagaggaaagatacaggtatgagcgactggaggaccagctgcatgacctgacggacctgcatcagcatgagacagccaacctgaagcaggagctggccagcattgaggagaaggtggcctaccaggcctacgagcgctcgcgggacatccaggaagccttggaatcctgccagactcgcatttctaagctggagctccaccagcaagagcagcaagctctgcagacagacaccgtgaatgctaaagttctcctggggaggtgcatcaacgtgatcctggccttcatgactgtcatcttagtgtgtgtgtccaccatcgcgaagttcgtctcacccatgatgaagagtcgctgccacattcttggcaccttctttgccgtgactcttcttgctatattttgtaaaaactgggaccatatcctgtgtgccatagaaaggatgataataccaagatgaagccactggttcctgccttcaagttctttcaagtttttattttaaagaaaactctgtgcatactaccaaattttacagtgaatgattgtgcggactcgtgtgtaagaaaaactaggactgtgtggtgtaaataactacaattctcttaactcggtagcagttgccaactcagtccttgtacttcgttaacacggatctgtttcagagctctcctaccttgctcactgccttaatcagaccgatttcctgcccacctgaccagcccaacgtggtaaacctctgt

SEQ ID NO: 24 - DNA, 5824 bp, Homo sapiens
  CDS (590)..(5824)
ttcgagatccctagtcagtgtggtggaattcctttacaccagacaggcctcattttaaatcctgtctctaccgtttactagctgtgtgatcttgggcaagatacttaacctctctgagtttctgtttcctcatctatcaatgaagatgatactatgaacccaataaggctgttaaaacaggttttttattacctaccacggcgggctgtacatctctgacgtacagaaggaggacgccctctccacctatcgctgcatcaccaagcacaagtatagcggggagacccggcagagcaatggggcacgcctctctgtgacagaccctgctgagtcgatccccaccatcctggatggcttccactcccaggaagtgtgggccggccacaccgtggagctgccctgcaccgcctcgggctaccctatccccgccatccgctggctcaaggatggccggcccctcccggctgacagccgctggaccaagcgcatcacagggctgaccatcagcgacttgcggaccgaggacagcggcacctacatttgtgaggtcaccaacaccttcggttcggcagaggccacaggcatcctcatggtcattgatccccttcatgtgaccctgacaccaaagaagctgaagaccggcattggcagcacggtcatcctctcctgtgccctgacgggctccccagagttcaccatccgctggtatcgcaacacggagctggtgctgcctgacgaggccatctccatccgcgggctcagcaacgagacgctgctcatcacctcggcccagaagagccattccggggcctaccagtgcttcgctacccgcaaggcccagaccgcccaggactttgccatcattgcacttgaggatggcacgccccgcatcgtctcgtccttcagcgagaaggtggtcaaccccggggagcagttctcactgatgtgtgcggccaagggcgccccgccccccacggtcacctgggccctcgacgatgagcccatcgtgcgggatggcagccaccgcaccaaccagtacaccatgtcggacggcaccaccatcagccacatgaacgtcacaggcccccagatccgcgacgggggcgtgtaccggtgcacagcgcggaacttggtgggcagtgctgaatatcaggcgcgaataaacgtaagaggcccacccagcatccgggctatgcggaacatcacagcagtcgccgggcgggacacccttatcaactgcagggtcatcggctatccctactactccatcaagtggtacaaggatgccctgctgctgccagacaaccaccgccaggtggtgtttgagaatgggaccctcaagctgactgacgtgcagaagggcatggatgagggggagtacctgtgcagtgtcctcatccagccccagctctccatcagccagagcgttcacgtagccgtcaaagtgccccctctgatccagcccttcgaattcccacccgcctccatcggccagctgctctacattccctgtgtggtgtcctcgggggacatgcccatccgtatcacctggaggaaggacggacaggtgatcatctcaggctcgggcgtgaccatcgagagcaaggaattcatgagctccctgcagatctctagcgtctccctcaagcacaacggcaactatacatgcatcgccagcaacgcagccgccaccgtgagccgggagcgccagctcatcgtgcgtgtgccccctcgatttgtggtgcaacccaacaaccaggatggcatctacggcaaagctggtgtgctcaactgctcggtggacggctaccccccacccaaggtcatgtggaagcatgccaaggggagcgggaacccccagcagtaccaccctgtgcccctcactggccgcatccagatcctgcccaacagctcgctgctgatccgccacgtcctagaagaggacatcggctactacctctgccaggccagcaacggcgtaggcaccgacatcagcaagtccatgttcctcacagtcaagatcccggccatgatcacttcccaccccaacaccaccatcgccatcaagggccatgcgaaggagctaaactgcacggcacggggtgagcggcccatcatcatccgctgggagaagggggacacagtcatcgaccctgaccgcgtcatgcggtatgccatcgccaccaaggacaacggcgacgaggtcgtctccacactgaagctcaagcccgctgaccgtggggactctgtgttcttcagctgccatgccatcaactcgtatggggaggaccggggcttgatccaactcactgtgcaagagccccccgaccccccagagctggagatccgggaggtgaaggcccggagcatgaacctgcgctggacccagcgattcgacgggaacagcatcatcacgggcttcgacattgaatacaagaacaaatcagattcctgggacttcaagcagtccacacgcaacatctcccccaccatcaaccaggccaacattgtggacttgcacccggcatctgtgtacagcatccgcatgtactctttcaacaagattggccgcagtgaaccaagcaaggagctcaccatcagcactgaggaggccgctcccgatgggccccccatggatgttaccttgcagccagtgacctcacagagcatccaggtgacctggaaggcacccaagaaggagctgcagaacggtgtcatccggggctaccagattggctacagagagaacagccccggcagcaacgggcagtacagcatcgtggagatgaaggccacgggggacagcgaggtctacaccctggacaacctcaagaagttcgcccagtatggggtggtggtccaagccttcaatcgggctggcacggggccctcttccagcgagatcaatgccaccactctggaggatgtgcccagccagccccctgagaacgtccgggccctgtccatcacttctgacgtggccgtcatctcctggtcagagcccccgcgcagcaccctcaatggcgtcctcaaaggctatcgggtcatcttctggtccctctatgttgatggggagtggggcgagatgcagaacatcaccaccacgcgggagcgggtggagctgcggggcatggagaagttcaccaactacagcgtccaggtgctggcctacacccaggctggggacggcgtacgcagcagtgtgctctacatccagaccaaggaggacgttccaggtccccctgctggcatcaaagctgtcccttcatcagctagcagtgtggttgtgtcttggctcccccctaccaagcccaacggggtgatccgcaagtacaccatcttctgttccagccccgggtctggccagccggctcccagcgagtacgagacgagtccagagcagctcttctaccggatcgcccacctaaaccgcggtcagcagtatctgctgtgggtggccgccgtcacctctgccggccggggcaacagcagcgagaaggtgaccatcgagcctgctggcaaggccccagcaaagatcatctcctttgggggcaccgtgacaacaccttggatgaaagatgttcggctgccttgcaattcagtgggagatccagcccctgctgtgaagtggaccaaggacagtgaagactcggccattccagtgtccatggatgggcaccggctcatccacaccaatggcacactgctgctgcgtgcagtgaaggctgaggactctggctactacacgtgcacggccaccaacactggtggctttgacaccatcatcgtcaaccttctggtgcaagttcccccggaccagccccgcctcactgtctccaaaacctcagcttcgtccatcaccctgacctggattccaggtgacaatgggggcagctccatccgaggcttcgtgctacagtactcggtggacaacagcgaggagtggaaggatgtgttcatcagctccagcgagcgctccttcaagctggacagcctcaagtgtggcacgtggtacaaggtgaagctggcagccaagaacagcgtgggctctgggcgcatcagcgagatcatcgaggccaagacccacgggcgggagccctccttcagcaaagaccaacacctcttcacccacatcaactccacgcatgctcggcttaacctgcagggctggaacaatgggggctgccctatcacagccatcgttctggagtaccggcccaaggggacctgggcctggcagggcctccgggccaacagctccggggaggtgtttctgacggaactgcgagaggccacgtggtacgagctgcgcatgagggcttgcaacagtgcgggctgcggcaatgaaacagcccagttcgccaccctggactacgatggcagcaccattccacccatcaagtctgctcaaggtgaaggggatgatgtgaagaagctgttcaccatcggctgccctgtcatcctggccacactgggggtggcactgctcttcatcgtacgcaagaagaggaaggagaaacggctgaagcgactccgagatgcaaagagtttggcagaaatgttgataagcaagaacaatagaagctttgacacccctgtgaaagggccaccccagggcccacggctacacattgacatccccagggtccagctgctcatcgaggacaaagaaggcatcaagcaactgggagatgacaaggccaccatccctgtgacagatgctgagttcagccaagctgtcaacccacagagcttctgtactggcgtctccttgcaccacccaaccctcatccagagcacaggacccctcatcgacatgtctgacatccggccaggaaccaatccagtgtccaggaagaatgtgaagtcagcccacagcacccggaaccggtactcaagccagtggaccctgaccaagtgccaggcctccacacctgcccgcaccctcacctccgactggcgcaccgtgggctcccagcatggtgtcacggtcactgagagtgacagctacagtgccagcctgtcccaggacacagacaaaggaaggaacagcatggtgtccactgagagtgcctcttccacctacgaggagctggcccgggcctatgagcatgccaagctggaggagcagctgcagcacgccaagtttgagatcaccgagtgcttcatctctgacagttcctctgaccagatgaccacaggcaccaacgagaacgccgacagcatgacatccatgagcacaccctcagagcctggcatctgccgctttaccgcctcaccacccaagccccaggatgcggaccggggcaaaaacgtggctgtgcccatccctcaccgggccaacaagagtgactactgcaacctgcccctgtatgccaagtcagaggccttctttcgaaaggcagatggacgtgagccctgccccgtggtcccaccccgtgaggcctccatccggaacctggctcgaacctaccacacccaggctcgccacctgaccctggaccctgccagcaagtccttgggccttccccacccaggggcccccgctgccgcctccacagccaccttacctcagaggactctggccatgccagcccccccagccggcacagcccccccagcccccggccccacccctgctgagccacccaccgcccccagcgctgcccctccggcccccagcaccgagcctccacgagccgggggcccacacaccaaaatggggggctccagggactcgcttctcgagatgagcacatcgggggtagggaggtctcagaagcagggggccggggcctactccaaatcctacaccctggtgtag

SEQ ID NO: 25 - DNA, 2818 bp, Homo sapiens
  CDS (449)..(2818)
aaggatccttaattaaattaatcccccccccccccctggctcgtctgaacttgaagacaccccacattccaagatgcccgaggttcctgggaatgcctggggttcttcgatccggaaaatcctaccggcatcctcctagggagggattattattattatttttctttaatctggaagagaagagaacaagttgtgcttttccccccttcttcttgctaaatgccatggatataactgaataagcggctcagggctttccccgcgtggacgtccgaggccaccatctgcctgcattcgccggagccgccggagggtttagctcgagtctgtctcgggcggggaaggatgcgtggccgagccggggagcccgggcgccccgcggagccggcctcggtgccacccagccgggggtagatgctgcctcgcccaggcgctgagtgaccagaccatggagaccctgcttggtggcctgctagcgtttggcatggcgtttgccgtggtcgacgcctgccccaagtactgtgtctgccagaatctgtctgagtcactggggaccctgtgcccctccaaggggctgctctttgtaccccctgatattgaccggcggacagtggagctgcgcctgggcggcaacttcatcatccacatcagccgccaggactttgccaacatgacggggctggtggacctgaccctgtccaggaacaccatcagccacatccagcccttttcctttctggacctcgagagcctccgctccctgcatcttgacagcaatcggctgccaagccttggggaggacaccctccggggcctggtcaacctgcagcaccttatcgtgaacaacaaccagctgggcggcatcgcagatgaggcttttgaggacttcctgctgacattggaggatctggacctctcctacaacaacctccatggcctgccgtgggactccgtgcgacgcatggtcaacctccaccagctgagcctggaccacaacctgctggatcacatcgccgagggcacctttgcagacctgcagaaactggcccgcctggatctcacctccaatcggctgcagaagctgccccctgatcccatctttgcccgctcccaggcttcggctttgacagccacaccctttgccccacccttgtcctttagttttgggggtaacccacttcactgcaattgtgagcttctctggctgcggaggctcgagcgggacgatgacctggaaacctgtggctccccagggggcctcaagggtcgctacttctggcatgtgcgtgaggaggagtttgtgtgcgagccgcctctcatcacccagcacacacacaagttgctggttctggagggccaggcggccacactcaagtgcaaagccattggggaccccagcccccttatccactgggtagcccccgatgaccgcctggtagggaactcctcaaggaccgctgtctatgacaatggcaccccggacatcttcatcaccacatctcaggacagtggtgccttcacctgcattgctgccaatgctgccggagaggccacggccatggtggaggtctccatcgtccagctgccacacctcagcaacagcaccagccgcactgcaccccccaagtcccgcctctcagacatcactggctccagcaagaccagccggggaggtggaggcagtgggggcggagagcctcccaaaagccccccggaacgggctgtgcttgtgtctgaagtgaccaccacctcggccctggtcaagtggtctgtcagcaagtcagcaccccgggtgaagatgtaccagctgcagtacaactgctctgacgatgaggtactgatttacaggatgatcccagcctccaacaaggccttcgtggtcaacaacctggtgtcagggactggctacgacttgtgtgtgctggccatgtgggatgacacagccacgacactcacggccaccaacatcgtgggctgcgcccagttcttcaccaaggctgactacccgcagtgccagtccatgcacagccagattctgggcggcaccatgatcctggtcatcgggggcatcatcgtggccacgctgctggtcttcatcgtcatcctcatggtgcgctacaaggtctgcaaccacgaggcccccagcaagatggcagcggccgtgagcaatgtgtactcgcagaccaacggcgcccagccaccgcctccaagcagcgcaccagccggggccccgccgcagggcccgccgaaggtggtggtgcgcaacgagctcctggacttcaccgccagcctggcccgcgccagtgactcctcttcctccagctccctgggcagtggggaggctgcggggctgggacgggccccctggaggatcccaccctccgccccgcgccccaagcccagccttgaccgcctgatgggggccttcgcctccctggacctcaagagtcagagaaaggaggagctgctggactccaggactccagccgggagaggggctgggacgtcggcccggggccaccactcggaccgagagccactgctggggccccctgcggcccgggccaggagcctgctccccttgccgttggagggcaaggccaaacgcagccactccttcgacatgggggactttgctgctgcggcggcgggaggggtcgtgccgggcggctacagtcctcctcggaaggtctcgaacatctggacgaagcgcagcctctctgtcaacggcatgctcttgccctttgaggagagtgacctggtgggggcccgggggacttttggcagctccgaatgggtgatggagagcacggtctag

SEQ ID NO: 26 - DNA, 2579 bp, Homo sapiens
  CDS (152)..(1633)
cgcctgcagtaccggtccgtacgcctgcggtaccggtccggaattcccgggtcgacccacgcgtccgagctgcacagcctgaatagaagggctggtccagcggcggcggaggctggcgctgtcctgagagggagggctctgtgcggaagagatgaatcggacaaagggtgatgaggaggagtattggaacagctccaagttcaaggcttttacctttgacgatgaagacgatgagctttcacagttaaaggagtccaagcgggcggtgaacagcctccgagacttcgtggatgatgatgacgatgatgacctggagcgagtcagctggagtggggaacctgtgggaagtatctcatggtccatcagagagactgctggtaatagcggctcaacccacgaggggcgtgaacagctaaagagccgaaacagcttctcctcctatgcacaactacccaagcctacttctacctactccctgagcagcttttttagaggtagaactagacctggaagtttccagtccctttctgatgctctgtcagacacacctgccaaaagctatgctccagagctggggagacccaaaggggagtatagggattacagcaatgactggagccccagtgatacagtgcgacgtctccggaagggcaaggtttgctcactagagagattccgctccttacaggacaaactacaactcctagaagaggcagtaagcatgcatgatggaaacgtcattactgcagttctgattttcctgaagaggacactgagcaaagagatcctcttccgagagctggaggtgcgacaggttgccctgagacatcttattcacttccttaaggaaataggggatcaaaagttgcttttagacctcttcaggttcctagatagaacagaagagcttgcgctatctcattatcgagagcatttgaacattcaggaccctgacaaacgaaaagaatttcttaaaacctgtgttggtttgccattttcagcagaagattccgcacacatacaggaccattacacgctcctggaacgtcagatcattattgaggcaaatgatcgccatctagaatcagcaggacagactgagatcttccgaaagcacccccgcaaagcctccatcctcaacatgccactagtgacaacacttttctactcctgcttctatcactacacagaggctgaggggacattcagcagtcccgtcaacctgaagaagacatttaagatcccagataaacagtatgtgctgacagccctggctgctcgtgccaagcttcgagcctggaatgatgtagatgccctattcaccacaaagaactggctgggctataccaagaagagagcacccattggcttccatcgggttgtcgaaattttgcacaagaacaatgcccctgtgcagatattacaggagtatgtcaatctggtggaagatgtggacacgaagttgaacttagccactaagttcaagtgccatgatgtcgtcattgatacctaccgggacctgaaggatcgtcaacagttgctagcatacaggagtaaggtagataaaggatcagcagaggaggagaagattgatgctcttctcagcagctcgcaaattcgatggaagaattaagtggcattgactaccttgaagcctgcctcatttcctcctctcctgcctgtgaaagcagagagagctcttctttgggagagctgcggcatcacatcgcttgggcccattacccatgggcagtgccagctactcttgacacagataacttcagactgatcttctgtccaaggaacatcatctgaggatcgagatctaaagctttgagtcatgagaatgattctctccacctggtgctcatatgaaggtgggagtgatttctagattgggcccctactgggtaagatctcacttggtctgagaaaagtgactgctccagaaaggaagaggtatgggagtcatagggtggctactgcattccactcagctaattatgatccaggacttggcgctggacattggcagttctgctctgaatgaagtcagaacagaaccaaaatggcctcaggaaggaatgccagtgtttcccaagacctcctggagatgcactcacaccagactgcacagacccctccacattatgccacacacggcctagacgttgtgtttcctcagccattttccctctgctgccccagtttactctgtccaaaaccctaaggttcttctctcacttgaacacagacgaccttgcttgggtgatgagacatcccctttatctcttcctctactgctggccaagacccgtcactttataagaagctcagatgcagcagtgctggagagctctctctttatgcaaaaatctcatttcaccaggagctttcagaagtttcacctgggctaaattcagcagcatttctgttaggatatttagatggaggttttattttcacacttggattcttgctctgtaccaatatttgcctccttttctgtgactgaactgggtttttctgacatgcctagactcctaataaaggtatttcttccttggaaaaaaaaaaaa

SEQ ID NO: 27 - DNA, 593 bp, Homo sapiens
  CDS (141)..(362)
acggccagtgaattgaatttaggtgacactatagaagagctatgacgtcgcatgcacgcgtacgtaagcttggatcctctagagcggccgcctactactactaaattcgcggccggtcgacttttttttttttttttgagatggagtctcgctctgtcacccaggctggagtgcagtggcgctatctcagctcactgcaagcttggcctccagggttcacgccattctcctgcctcagcctcccgagtagctgggactacaggcatccgccaccacgcccggctaattttttgtatttttctttagtagagacggagtttcagcgtgctagccaggatggtctcaatctcctgacctcgtgatctgcctgcctcggcctcccagagtgctgggattacaggtgtgaagcagctgtgccgggaggatgagggccgtagaagggtttgtgtgagaaaagggatgtgctggggatccagggtgggggggcaggggcgtgattggggcgcagtgagagctgaggctgccggggagagagagtctgcggagttaaggtgcccgaggagtgtgggccaaagttgtggggaagaaagcgg

SEQ ID NO: 28 - DNA, 691 bp, Homo sapiens
  CDS (179)..(454)
atttggccctcgaggccaagaattcggcacgagcaatttgtttatctgtgctgtgtagatggagatgaattgtttctaatttttagctaatacagataaagatactatgaatattcatgtataagtttttatatggacatatgcattcttttcttttgagtgaattcctgggaatggaatggtaggtagattttttttactttttgttttttattttatttttttttttttatttttttttaagacagagtctcactctgttgtccaggctggagtgcagtggtgcaatcttggctcactgcaacctccacctcccaggttcaagcaattctcctgccacagcctcataagtagctgggattacaggagtgtgccaccaagcccaggtaattttttaatttttagtagcaaatggggtttcaccatggtggccaggctggtctggaactcctgacctcaagtgatccacccgccttgacctcccaaagtgctgggattacagacgtgagccaccacgcccagcctttttttattttttaagaagctgctaaaaccgttttccaaagtagttattaacaggtaattgaataacaaaattgtggtatatctatacaatggaatactcctcagcaatatttgtgacaaagtggatgaaccccagaacaattacgctatgtgaaagaagccagac

SEQ ID NO: 29 - DNA, 1001 bp, Homo sapiens
  CDS (679)..(921)
  misc_feature (1)...(1001): n = a,t,c or g
aaaaaaaaaaaaactgaatgtcaaacccnacccctgttccgggccccgcaataatagaaaagtaaactttgaaaatgatgaaatctgggcccctgtgccaaggttgtcacgccctgtaatccccagcactttgggaggctgaggcaggcaaattgcttgagcccaagggtttcccagtcccaacctgggtaacatactgagaccctgtctccacaaaaaatacaaaaattagccaggtgtggtggtgtgctcctgtagtcccagctacttgggggcttagatgggaggatcacttgagctcaggaggtggtggctgcagtgagccatgattgtgggattggacttcagcctggatgacagagtgagatcctgtctcaaaaaaaaaaaaatcaatctttttttttgttcttcatttctttctgcctttgacagccccttcctgtctataaaactaacctcttctacccagctcattgcagcactctctgtattttatggagtgaatctgttcctgattcaatgagtctgttgcctgattctagaattgccaataacgctaattgagacctttaaactaaatttgttgtaatctggtgttttgacaggctgctgctctgagggaggtggaagtaaaggccgagagtatcaggatcactctggctgctaggtgcagatgagatgggaggagagcaagagagaggaaggacaggggccagttggaaaactattacagcaattctccagcctggccaacatggtgaaactctgtttctaataaaaacacaaaaattagggccaggcatggtggctcacacctgtaatcccagcactttgggaggccaaggcgggtggatcccaaggtcaagagatcgagatcatcctggccaacgcagtgaaaccccatctctactaaaattataaaaattagctgtgcgtggtggcacgcgcatgtagttccagctactcagctcgtgccgaattcttggcctcgagggccaaat

SEQ ID NO: 30 - DNA, 2165 bp, Homo sapiens
  CDS (60)..(1007)
taccgctccgcaattcccgggtcgacccacgcgtccggaaccggctcgcgagcgcagctatggctgctggcgtaccctgtgcgttagtcaccagctgctcctccgtcttctcaggagaccagctggtccaacatatccttggaacagaagatcttattgtggaagtgacttccaatgatgctgtgagattttatccctggaccattgataataaatactattcagcagacatcaatctatgtgtggtgccaaacaaatttcttgttactgcagagattgcagaatctgtccaagcatttgtggtttactttgacagcacacaaaaatcgggccttgatagtgtctcctcatggcttccactggcaaaagcatggttacctgaggtgatgatcttggtctgcgatagagtgtctgaagatggtataaaccgacaaaaagctcaagaatggtgcatcaaacatggctttgaattggtagaacttagtccagaggagttgcctgaggaggatgatgacttcccagaatctacaggagtaaagcgaattgtccaagccctgaatgccaatgtgtggtccaatgtagtgatgaagaatgataggaaccaaggctttagccttctcaactcattgactggaacaaaccatagcattgggtcagcagatccctgtcacccagagcaaccccatttgccagcagcagatagtactgaatccctctctgatcatcggggtggtgcatctaacacaacagatgcccaggttgatagcattgtggatcccatgttagatctggatattcaagaattagccagtcttaccactggaggaggagatgtggagaattttgaaagactcttttcaaagttaaaggaaatgaaagacaaggctgcgacgcttcctcatgagcaaagaaaagtgcatgcagaaaaggtggccaaagcattctggatggcaatcgggggagacagagatgaaattgaaggcctttcatctgatgaagagcactgaattattcatactagggtttgaccaacaaagatgctagctgtctctgagatacctctctactcagcccagtcatattttgccaaaattgcccttatcatgttggctgcctgacttgtttatagggtccccttaattttagtttttagtaggaggttaaggagaaatcttttttttcctcagtatattgtaagagagtgaggaatacagtgatagtaatgagtgaggatttcttaaatatactttttttttgttctaggaatgagggtaggataaatctcagaggtctgtgtgatttactcaagttgaagacaacctccaggccattcctggtcaaccttttaagtagcatttccagcattcacacttgatactgcacatcaggagttgtgtcacctttcctgggtgatttgggttttctccattcaaggagcttgtagctctgagctatgatgcttttattgggaggaaaggaggcagctgcagaattgatgtgagctatgtggggccgaagtctcagcccgcagctaagtctctacctaagaaaatgcctctgggcattcttttgaagtatagtgtctgagctcatgctagaaagaatcaaaaagccagtgtggatttttagactgtaataaatgaggcaaaggatttctattccagtgggaagaaaacctctctactgagttgtgggggatatgttgtatgttagagagaaccttaaggagtccttgtatgggccatggagacagtatgtgataacataccgtgattttcatgaagaaattcttctgtcttagagttctcccctgctgcttgagatgccagagctgtgttgttgcacacctgcaaaacaaggcacatttccccctttctctttaaagccaaagagagatcactgccaaagtgggagcactaaggggtgggtggggaagtgaaatgttaggcgatgaattcctgagcaccttgtttttcttccaaggttcgtagctcctctctgcccttccaagcctgtaacctcggaggactatcttttgttctttatcctttgtcttgtttgagtgggtcagccccagaggaactgataagcaaatggcaagtttttaaaggaagagtggaaagtactgcaaataaaaatccttatttgtttttgtaaaaaaaaaa

SEQ ID NO: 31 - DNA, 796 bp, Homo sapiens
  CDS (55)..(624)
  misc_feature (1)...(796): n = a,t,c or g
tggtcgactcgtgaattgaatttaggtgacactatagaagagctatgacgtcgcatgcacgcgtacgtaagcttggatcctctagagcggccgcctactactactactaaattcgcggccgcgtcgaccatctgcggtggagccgccaccaaaatgcagattttcgtgaaaacccttacggggaagaccatcaccctcgaggttgaaccctcggatacgatagaaaatgtaaaggccaagatccaggataaggaaggaattcctcctgatcagcagagactgatctttgctggcaagcagctggaagatggacgtactttgtctgactacaatattcaaaaggagtctactcttcatcttgtgttgagacttcgtggtggtgctaagaaaaggaagaagaagtcttacaccactcccaagaagaataagcacaagagaaagaaggttaagctggctgtcctgaaatattataaggtggatgagaatggcaaaattagtcgccttcgtcgagagtgcccttctgatgaatgtggtgctggggtgtttatggcaagtcactttgacagacattattgtggcaaatgttgtctgacttactgtttcaacaaaccagaagacaagtaactgtatgagttaataaaagacatgaactaacaaaaaaagtcgacgcggccgcgaatttagtagtagtaggcggccgctctagaggatccaagcttacgtacgcgtgcatgcgacgtcatagctcttctatagtgtcacctaaattcaattcacgcgtacaatgacagngctt

SEQ ID NO: 32 - DNA, 748 bp, Homo sapiens
  CDS (55)..(576)
  misc_feature (1)...(748): n = a,t,c or g
tggtcgactcgtgaattgaatttaggtgacactatagaagagctatgacgtcgcatgcacgcgtacgtaagcttggatcctctagagcggccgcctactactactactaaattcgcggccgcgtcgaccatctgcggtggagccgccaccaaaatgcagattttcgtgaaaacccttacggggaagaccatcaccctcgaggttgaaccctcggatacgatagaaaatgtaaaggccaagatccaggataaggaaggaattcctcctgatcagcagagactgatctttgctggcaagcagctggaagatggacgtactttgtctgactacaatattcaaaaggagtctactcttcatcttgtgttgagacttcgtggtggtgctaagaaaaggaagaagaagtcttacaccactcccaagaagaataagcacaagagaaagaaggttagtcgccttcgtcgagagtgcccttctgatgaatgtggtgctggggtgtttatggcaagtcactttgacagacattattgtggcaaatgttgtctgacttactgtttcaacaaaccagaagacaagtaactgtatgagttaataaaagacatgaactaacaaaaaaagtcgacgcggccgcgaatttagtagtagtaggcggccgctctagaggatccaagcttacgtacgcgtgcatgcgacgtcatagctcttctatagtgtcacctaaattcaattcacgcgtacaatgacagngctt

SEQ ID NO: 33 - DNA, 1049 bp, Homo sapiens
  CDS (55)..(909)
atttggccctcgaggccaagaattcggcacgagcgggcggctccgggagccaacatgcctcggtatgcgcagctggtcatgggccccgcgggcagcgggaagagcacctactgtgccaccatggtccagcactgtgaagccctcaaccggtctgtccaagttgtaaacctggatccagcagcagaacacttcaactactccgtgatggctgacatccgggaactgatcgaggtggatgatgtaatggaggatgattctctgcgattcggtcccaacggaggattggtattttgcatggagtactttgccaataattttgactggctggagaactgtcttggccatgtagaggacgactatatcctttttgattgtccaggtcagattgagttgtacactcacctgcctgtgatgaaacagctggtccagcagctcgagcagtgggagttccgagtctgtggagtttttcttgttgattctcagttcatggtggagtcattcaagtttatttctggcatcttggcagccctgagtgccatgatctctctagaaattccgcaagtcaacatcatgacaaaaatggatctgctgagtaaaaaagcaaaaaaggaaattgagaaatttttagatccagacatgtattctttattagaagattctacaagtgacttaagaagcaaaaaattcaagaaactgactaaagctatatgtggactgattgatgactacagcatggttcgatttttaccttacgatcagtcagatgaagaaagcatgaacattgtattgcagcatattgattttgccattcaatatggagaagacctagaatttaaagaaccaaaggaacgtgaagatgagtcttcctctatgtttgacgaatattttcaagaatgccaggatgaatgaagagtttactaaaagtaaccatctaaagagcttgtggccaaaccagcagaacattcttctcttcaaaggatgcaatagtagaaagctacttattttaatgaaaaaaagtaaaacttcgttctttatcagcaaaaaaaaaa

SEQ ID NO: 34 - DNA, 1113 bp, Homo sapiens
  CDS (197)..(856)
ttaaacttaagcttggtaccgagctcggatccactagtccagtgtggtggaattccttcatacaacaagaggaagagtctgcacgcagaagcaccaccttctagggataaataaagggtcaagctaaggaagggcagaacaaacttcagacactcacttctttgcctcaacttcagcctgctctcacaacctcactatgtcttgccccaactactgctcgggaaactccaactcaggatctctcagaacctcccgccatattcctctcacctccatcgacctctgccctaccagcgtgagctgtggagatgtcctctacttacccactagctctcaagaccatacctgggtcacagacaactgccaagagacctgcggtgaaccaaccagctgccagccggtccactgtgagaccggcaatcttgaaacctcttgcggttcttccactgcttactacgtgcccaggccttgccaaggaagcagttttcttcctgcttctttcttctccagttcctgccttccagtatcctgtagaccacagaggtatgtgtccagcggctgtcgtccactgaggccgctgctcaatagttaccagcccatagggagactgtgtgcccaatgcctatcgcccccaattctccttgtccaagagttgccagccccaaaacctcctcacttctggatgccaaccctcgagttgcttggcctatcgtcctcaaagtcttcacgttgtgtccagcagcctcagacctctggggactctgttcagtggttgccaacctctgacccatgtgttcagcacgtgtcgtccatcttgctctggactgtgaaaccagcagcttctttgttccagtgaataatcactctgagcatccacaacaaaaattcaaactccatggacttttgcttctttgctagtagcaactgatgtttcttagttttactgtgcctgatctaatgcaagctgcttctctcgcatgttttatcttgttttcatctttccttgacatcaaaaaaattagtttacaatgctattcaatgttgctctggtctgggaagaatgtatttgttttgcactataataaatgcgattaagtccaaataggtacccga

SEQ ID NO: 35 - DNA, 2390 bp, Homo sapiens
  CDS (140)..(2044)
cggacgcgtgggcggacgcgtgggcgcagccgcctccagggcaatttgcatatttctccaaagaaccatccagaacctgagcagcctgtcttcagacagagagaggcccacggctgtttcttgaaatctggcgctgggaatggccatgtggaacaggccatgccagaggctgcctcagcagcctctggtagctgagcccactgcagagggggagccacacctgcccacgggccgggagctgactgaggccaaccgcttcgcctatgctgccctctgtggcatctccctgtcccagttatttcctgaacccgaacacagctccttctgcacagagttcatggcaggcctggtgcagtggctggagttgtctgaagctgtcttgccaaccatgactgcttttgcgagcggcctgggaggtgaaggagcagatgtgtttgttcaaattttactgaaggaccccatcttgaaggacgacccgacggtgatcactcaggaccttctgagcttctcactcaaggatgggcactatgacgcccgggccagagtcctcgtttgccacatgacctccctgctccaagtgcccttggaggagctggatgtccttgaagagatgttcctggagagcctgaaggaaatcaaagaagaggaatctgaaatggccgaggcatcccgaaagaagaaagaaaaccggaggaaatggaagcgttatctcctgataggcctggcgactgtcggaggcggaacggtgatcggtgtgactggaggtctagctgcaccccttgttgccgctggagcagcgacgattattggcagcgccggggcagcggctctgggctcagcagccggcatagccatcatgacctcgctgtttggtgcagctggagctggcctgacaggatacaagatgaagaagcgagtgggagccattgaagagttcacgtttctgcctctgacggagggcaggcagctgcacatcaccatcgccgtcacggggtggctcgcttctggcaaataccgcaccttcagtgccccgtgggctgccctggcccacagccgtgagcagtactgcctggcctgggaagccaagtacctgatggagctcggcaatgccctggagaccatcctcagtggtctcgccaacatggtggcccaggaggccctaaagtacacagtgttgtctggcattgtggctgccctgacctggccagcctcactcctcagtgtcgccaatgtcatcgacaacccctggggggtgtgtctccatcgatcagcagaggttggcaagcacctggcccacatcctgctctcccggcagcaggggcgacgacctgtcaccttgattggcttcagcctgggagccagagtcatctacttctgtctgcaggagatggctcaagagaaagattgccaaggaatcatcgaggacgtcatcctgctgggtgcgcctgtggagggagaagccaagcattgggagcctttccggaaggtggtgtccgggaggatcatcaacggctactgcaggggagactggctgctgagtttcgtgtaccgcacatcctcggtgcagctccacgtcgccggcctacagcccgtgctgctgcaggacaggagggtggagaacgtggacctgacctctgtggtcagcggccacctggactatgccaagcagatggatgccatcctgaaggccgtgggcatccgcaccaagccaggctgggacgagaaggggctcttgctggccccaggctgcctgccctccgaggagcctcgccaggcagcagctgccgcctcatcaggcgagaccccccaccaggttgggcaaacccagggtcccatatccggagacacctccaaattggccatgtccacagaccccagccaagcccaggtgccagtagggctggaccagtctgaaggggcctcccttcctgctgctgccagccctgaaaggccccccatctgcagccatggcatggaccccaacccactgggctgccccgattgtgcctgcaagacccagggccccagcacggggctggactgaccacagcaggggacctgagccgtcttccccagtctccatatgcagctctctcttataccctcgggttcctcccaggagctctggaggtacaggatttccacaggcctctttcctaaatggaaggaattggaactgaaagggaaaggaaatggaaggaaggggaatttggaggagagaacacgcccacccttgggaagctgcctgtccccagaggagccccaccagggagcagctgccccctcatcagagacctgcagagtcaaccaagcacaggttagagtcccaggaccggaaaccaactgtgggctttctgtacttctcatagctttggagtctggctgtccat

SEQ ID NO: 36 - DNA, 996 bp, Homo sapiens
  CDS (106)..(960)
ccctacttgaatactgtgacgcaagccggctagcgtttaaacttaagcttggtaccgagctcggatccactagtccagtgtggtggaattctctgggaagggagaatggcggcgcccgggctgcggctgggagcgggaagactctttgaaatgcctgcggtgctagagcgactgagccgctataatagcacgtcccaagcttttgctgaggtgctgcggctgccgaagcagcagctgaggaagctgctgtacccgctgcaggaagtagagcggttcctcgccccctacgggaggcaagaccttcacctgcgtatctttgacccaagcccggaggacatagccagggcggacaacatcttcacggccactgaacggaaccgcatcgactacgtcagctccgccgtccgtatcgaccacgccccggaccttccgcggccagaggtgtgttttataggcagaagcaatgttggaaaatcatctctaatcaaggctttattttcactggcccctgaggttgaagtcagagtctccaaaaaaccaggacacacaaagaaaatgaattttttcaaagttggaaaacattttacagtggtggacatgccaggttatggctttagagcacctgaagattttgttgacatggtagagacctatctaaaagaacgaaggaacttgaagagaacatttttattagtggatagcgttgttggaattcaaaaaacagacaatattgccatagaaatgtgtgaagaatttgcattaccttatgtgattgtattaacaaaaattgacaaatcttccaagggacatcttttaaaacaagtgcttcagatccagaaatttgttaacatgaaaactcaaggatgttttcctcagttgtttcctgtaagtgctgtgaccttttctggaatccacctgttgagatgctttatagccagtgtaacaggaagtcttgactaatggttcccggtttagctgaagattcaaaaaaaaaaa

SEQ ID NO: 37 - DNA, 1416 bp, Homo sapiens
  CDS (547)..(1302)
gatatccttcagaacattagaattctcgtgcggtgttacgttgaagtggaccggtttagtcagcaatggccagacccacctaaatgaacacagacccatatggtggtctgtccttttacagccagtagtgctcgccgcagtcgagcgacagggcgaagccctcgagtgagcgaggaagccccagggaacagcacttatatattctgcttccacacgatgcctgaaaaaacttcccctgtggggttatccacttatccacggggatatttttataattattttttttatagtttttagatcttcttttttagagcgccttgtaggcctttatccatgctggttctagagaaggtgttgtgacaaattgccctttcagtgtgacaaatcaccctcaaatgacagtcctgtctgtgacaaattgcccttaaccctgtgacaaattgccctcagaagaagctgttttttcacaaagttatccctgcttattgactcttttttatttagtgtgacaatctaaaaacttgtcacacttcacatggatctgtcatggcggaaacagcggttatcaatcacaagaaacgtaaaaatagcccgcgaatcgtccagtcaaacgacctcactgaggcggcatatagtctctcccgggatcaaaaacgtatgctgtatctgttcgttgaccagatcagaaaatctgatggcaccctacaggaacatgacggtatctgcgagatccatgttgctaaatatgctgaaatattcggattgacctctgcggaagccagtaaggatatacggcaggcattgaagagtttcgcggggaaggaagtggttttttatcgccctgaagaggatgccggcgatgaaaaaggctatgaatcttttccttggtttatcaaacgtgcgcacagtccatccagagggctttacagtgtacatatcaacccatatctcattcccttctttatcgggttacagaaccggtttacgcagtttcggcttagtgaaacaaaagaaatcaccaatccgtatgccatgcgtttatacgaatccctgtgtcagtatcgtaagccggatggctcaggcatcgtctctctgaaaatcgactggatcatagagcgttaccagctgcctcaaagttaccagcgtatgcctgacttccgccgccgcttcctgcaggtctgtgttaatgagatcaacagcagaactccaatgcgcctctcatacattgagaaaaagaaaggccgccagacgactcataacgcattttccttccgcgatatcacttccatgacgacaggatagtctgagggtatctgtcacagattgagaggggggttcgtccatttggtctggacctacggaggggaattgggcccaagtttggtggttccttcaccccgggggatttttcaaact

SEQ ID NO: 38 - DNA, 1642 bp, Homo sapiens
  CDS (773)..(1528)
gccacttcatggggcggcgttgggaggcggcgagaatggggcgcaggggcgtgaagtgggtacgcagggtggtcccgctcccgacgtgttaaagcgcggcccagggccaagttgcaggctcggggcgcctttagaggatccgccttattattcccagagcctgggaagcgtttatagaagtagtgttctgtcattatgcctgcaaccggtaacaaaaacgatttgaatatgcttcagggaccaatagaaatcttggtgcggtgttacgttgaagtggagcggattatgtcagcaatggacagaacaacgtaatgaacacagacccatgatgtggtctgtccttttacagccagtagtgctcgccgcagtcgagcgacagggcgaagccctcgagtgagcgaggaagcaccagggaacagcacttatatattctgcttacacacgatgcctgaaaaaacttcccttggggttatccacttatccacggggatatttttataattattttttttatagtttttagatcttcttttttagagcgccttgtaggcctttatccatgctggttctagagaaggtgttgtgacaaattgccctttcagtgtgacaaatcaccctcaaatgacagtcctgtctgtgacaaattgcccttaaccctgtgacaaattgccctcagaagaagctgttttttcacaaagttatccctgcttattgactcttttttatttagtgtgacaatctaaaaacttgtcacacttcacatggatctgtcatggcggaaacagcggttatcaatcacaagaaacgtaaaaatagcccgcgaatcgtccagtcaaacgacctcactgaggcggcatatagtctctcccgggatcaaaaacgtatgctgtatctgttcgttgaccagatcagaaaatctgatggcaccctacaggaacatgacggtatctgcgagatccatgttgctaaatatgctgaaatattcggattgacctctgcggaagccagtaaggatatacggcaggcattgaagagtttcgcggggaaggaagtggttttttatcgccctgaagaggatgccggcgatgaaaaaggctatgaatcttttccttggtttatcaaacgtgcgcacagtccatccagagggctttacagtgtacatatcaacccatatctcattcccttctttatcgggttacagaaccggtttacgcagtttcggcttagtgaaacaaaagaaatcaccaatccgtatgccatgcgtttatacgaatccctgtgtcagtatcgtaagccggatggctcaggcatcgtctctctgaaaatcgactggatcatagagcgttaccagctgcctcaaagttaccagcgtatgcctgacttccgccgccgcttcctgcaggtctgtgttaatgagatcaacagcagaactccaatgcgcctctcatacattgagaaaaagaaaggccgccagacgactcatatcgtattttccttccgcgatatcacttccatgacgacaggatagtctgagggtatctgtcacagattgagaggggggttcgtccatttggtctggacctacggaggggaattgggcccaagtttggtggttccttcaccccgggggatttttcaaact

SEQ ID NO: 39 - DNA, 3414 bp, Homo sapiens
  CDS (238)..(2868)
taagtcgtcgcctgcactaccggtccggaattcccgggtcgacgatttcgtgctgggtggtcgggcgcttggtccggtagttgttcggtggaccagcggcccgtcgctcgcttctgggctctcatgtttgaaggtgggagggacacgggagcggcccgcacacctgagccgcccggagaggagcctcggccccgtacccagtaagaagaggaggaggccaggcaggcaaaaggagtcatggcttctgatgctagtcatgcgctggaagctgccctggagcaaatggacgggatcattgcaggcactaaaacaggtgcagatcttagtgatggtacttgtgagcctggactggcttccccggcctcctacatgaaccccttcccggtgctccatctcatcgaggacttgaggctggccttggagatgctggagcttcctcaggagagagcagccctcctgagccagatccctggcccaacagctgcctacataaaggaatggtttgaagagagcttgtcccaggtaaaccaccacagtgctgctagtaatgaaacctaccaggaacgcttggcacgtctagaaggggataaggagtccctcatattgcaggtgagtgtcctcacagaccaagtagaagcccagggagaaaagattcgagacctggaagtgtgtctggaaggacaccaggtgaaactcaatgctgctgaagagatgcttcaacaggagctgctaagccgcacatctcttgagacccagaagctcgatctgatgactgaagtgtctgagctgaagctcaagctggttggcatggagaaggagcagagagagcaggaggagaagcagagaaaagcagaggagttactgcaagagctcaggcacctcaaaatcaaagtggaagagttggaaaatgaaaggaatcagtatgaatggaagctaaaggccactaaggctgaagtcgcccagctgcaagaacaggtggccctgaaagatgcagaaattgagcgtctgcacagccagctctcccggacagcagctctccacagtgagagtcacacagagagagaccaagaaattcaacgtctgaaaatggggatggaaactttgctgcttgccaatgaagataaggaccgtcggatagaggagcttacggggctgttaaaccagtaccggaaggtaaaggagattgtgatggtcactcaagggccttcggagagaactctctcaatcaatgaagaagaaccggagggaggtttcagcaagtggaacgctacaaataaggaccctgaagaattatttaaacaagagatgcctccaagatgtagctctcctacagtggggccacctccattgccacagaaatcactggaaaccagggctcagaaaaagctctcttgtagtctagaagacttgagaagtgaatctgtggataagtgtatggatgggaaccagcccttcccggtgttagaacccaaggacagccctttcttggcggagcacaaatatcccactttacctgggaagctttcaggagccacgcccaatggagaggctgccaaatctcctcccaccatctgccagcctgacgccacggggagcagcctgctgaggctgagagacacagaaagtggctgggatgacactgctgtggtcaatgacctctcatccacatcatcgggcactgaatcaggtcctcagtctcctctgacaccagatggtaaacggaatcccaaaggcattaagaagttctggggaaaaatccgaagaactcagtcaggaaatttctacactgacacgctggggatggcagagtttcgacgaggtgggctccgggcaaccgcagggccaagactctctaggaccagggactccaagggacagaaaagtgacgccaatgccccctttgcccagtggagcacagagcgtgtgtgtgcatggctggaggactttggcctggctcagtatgtgatctttgccaggcagtgggtatcttctggccacaccttattgacagccacccctcaggacatggaaaaggagctaggaattaagcacccactccacaggaagaagcttgttttagcagtgaaagccatcaacaccaaacaggaggagaagtctgcactgctagaccacatttgggtgacaaggtggcttgatgatattggcttaccccagtacaaagaccagtttcatgaatctagagttgacggacgaatgctgcaatacctaactgtgaacgatttactcttcttaaaagtcaccagccaactacatcatctcagcatcaaatgtgccattcacgtgctgcatgtcaacaagttcaacccccactgcctgcacctgcggccagctgatgagagtaacctttctccttcagaagttgtacagtggtccaaccacagggtgatggagtggttacgatctgtggacctggcagagtatgcacccaatcttcgagggagtggagtccatggaggcctcattatcctggagccacgcttcactggggacaccctggctatgcttctcaacatccccccacaaaagacgctcctcaggcgccacctgaccaccaagttcaatgccttgattggtccggaggctgaacaggagaagcgagagaaaatggcctcaccagcttacacaccactgaccaccacagccaaagtccggccaaggaaactaggattttcacacttcggaaacataagaaaaaagaagttcgatgaatcgacggactacatttgcccaatggagcccagtgacggtgtcagtgatagtcacagggtctacagtggctaccggggcctcagcccccttgatgcccctgaactggatgggctggaccaggtgggacagattagctgatgcccttgtcacctgccctctgtgcaccctgagagctcacagtaacactgtgtgtgtcaccatataactgcacctcacccccgcacgtgtgcatgactcgcagagaatattccagcaattgtgtacccctgggccagtctctttgaaccctgagggtggccaggatctggagctgcatctctaaggggccaggctttggggaccattgccaaaggtggactcaggaggaaagacacttaaagacacttttacatgtctagtaattcttgatgttcatcttcagcaccagtggaaacacatgaacttcgatgcaggtccagagaccatggacactcccacgaggctcagctctcaggcaccccctacacttcagttgagggaaaagctcaagtgccttaggcccgtggaccacagtcttggctgagatcaaagggatgagcaacagggacttctgccacagtgacaatggaattgtgttgtgccttacttcagaggtggtctcttctttcttgtaataaaagcaatatttatgcggaaaaaaaaaaa

SEQ ID NO: 40 - DNA, 996 bp, Homo sapiens
  CDS (6)..(917)
gagctatgacgtcgcatgcacgcgtacgtaagcttggatcctctagagcggccgctactactactaattacggcggtcgaccggcaccggaagacggaggtcctctttccttgcctaacgcagccatggctcgtggtcccaagaagcatctgaagcgggtggcagctccaaagcattggatgctggataaattgaccggtgtgtttgctcctcgtccatccaccggtccccacaagttgagagagtgtctccccctcatcattttcctgaggaacagacttaagtatgccctgacaggagatgaagtaaagaagatttgcatgcagcggttcattaaaatcgatggcaaggtccgaactgatataacctaccctgctggattcatggatgtcatcagcattgacaagacgggagagaatttccgtctgatctatgacaccaagggtcgctttgctgtacatcgtattacacctgaggaggccaagtacaagttgtgcaaagtgagaaagatctttgtgggcacaaaaggaatccctcatctggtgactcatgatgcccgcaccatccgctaccccgatcccctcatcaaggtgaatgataccattcagattgatttggagactggcaagattactgatttcatcaagttcgacactggtaacctgtgtatggtgactggaggtgctaacctaggaagaattggtgtgatcaccaacagagagaggcaccctggatcttttgacgtggttcacgtgaaagatgccaatggcaacagctttgccactcgactttccaacatttttgttattggcaagggcaacaaaccatggatttctcttccccgaggaaagggtatccgcctcaccattgctgaagagagagacaaaagactggcggccaaacagagcagtgggtgaaatgggtccctgggtgacatgtcagatctttgtacgtaattaaaaatattgtggcaggattaatagcaaaaaaaaaaaa

SEQ ID NO: 41 - DNA, 6586 bp, Homo sapiens
  CDS (1)..(2946)
  misc_feature (1)...(6586): n = a,t,c or g
atgggctgcaggtccccggacctagctagtaaggacagctattatcttaaaggtggcagagaggcccagagcccttgggcctaccagttcctgagtaagactggctgggctgcagacttctggaatgcagggatggctcatgcacgagatggctgcaggggctggggagtgggctgcaccagcatcagtcctacagctgaactggggctggtgctgccaggtgagctgccagctgcccacatcagcgtggcgctccaggcgcaaggagtgagtaagctgccgcgcaaagtcatggctggcagagggttgagcagccccagggatcgtttcatctctaacctctcaatccaccaaggagcaagccagggccagagggagggtcctccctgcatcgccatcctggcagaacttgtgccagcctttttggctcttctgtttgagcaggcggttggacccgtgcccctcgcctgctgccagcacagactgcccactgtggggctcctggctgctggctggggttcaagtttgttgggggaagcaccttggctgggccctgagctctgggagacaccacatcagctggctgggcctctggcagaccccagctccaagtctggtcctgaggagctgcaggcccagattccttcaggggtgctagccggagccctcccggagcgctcggggttcgacccccgagcacggcgggaggagggcgcccccctgcggcacagccacgtccacgaagcccctcccggggttctagaaagcggaggcctccgctgtgatttggacagaaatcagctgccacgtgcaacattctcccatgggaacatgtgtccgcagtacctatctcagagcccaaatccttcctgccccacagccttctcctggaacctgccttgggcttacacagcttacctctcaggaatgctacgttttgaacatcaagaatggaaagctgccattgaggcttttaacaaatgcaaaactatctatgagaagctagccagtgctttcacagaggagcaggctgtgctgtataaccaacgtgtggaagagatttcacccaacatccgctattgtgcatataatattggggaccagtcagccatcaatgaactcatgcagatgagattgaggtctgggggcactgaaggtctcttggctgaaaaattggaggctttgatcactcagactcgagccaaacaggcagctaccatgagtgaagtggagtggagagggagaacggttccagtgaagattgacaaagtgcgcattttcttattaggactggctgataacgaagcagctattgtccaggctgaaagcgaagaaactaaggagcgcctgtttgaatcaatgctcagcgagtgtcgggacgccatccaggtggttcgggaggagctcaagccagatcagaaacagagagattatatccttgaaggagagccagggaaggtgtctaatcttcaatacttgcatagctacctgacttacatcaagctatcaacggcaatcaagcgtaatgagaacatggccaaaggtctgcagagggctctgctgcagcagcagccagaggatgacagcaagcgctcaccccggccccaggacctgatccgactctatgacatcatcttacagaatctggtggaattgctccagcttcctggtttagaggaagacaaagccttccagaaagagataggcctcaagactctggtgttcaaagcttacaggtgttttttcattgctcagtcctatgtgctggtgaagaagtggagcgaagcccttgtcctgtatgacagagtcctgaaatatgcaaatgaagtaaattctgatgctggcgccttcaagaacagcctaaaggaggcatccgctcgacggcgggagattgaggacaagctgaagcaggaggaggagactctgtccttcatccgagacagcctggagaagagcgaccagctcactaagaacatggggagactggaaaagcacaaagtgtctatcttatcatcctttgagagccgccttatgaagctggagaactccatcatccctgtgcacaagcagacggagaatctgcagcggctgcaggagaatgttgagaagacgctgtcctgcctggaccatgtcatcagctactaccatgtggccagtgacactgagaagatcatcagagagggccccacaggtaggctggaagagtacctgggaagcatggccaagattcagaaggcagtggagtatttccaggacaacagcccagacagcccggaactcaacaaagtgaaactgctctttgagcgcgggaaggaggccctggagtccgaatttcgcagcctgatgacgcggcacagtaaggtcgtctcgcccgtgctcatcttggatctgatcagtggtgacgatgatctggaggcccaggaggacgtgaccctggagcacctgcccgagagcgtgctccaggatgtcattcgcatctcccgctggctggtggaatatggccgcaaccaagatttcatgaacgtctactaccagatacgctccagccagctggaccgctccatcaaaggactgaaggagcatttccataagagcagttcttcctctggggttccctactcccctgctatccccaacaagaggaaagacacacctaccaagaagccagtcaagcggccagggacgatccgtaaggctcagaaccttctgaaacagtattcccagcatggtctagatgggaaaaaggggggctctaacctcattcctctggaagggagagatgacatgctggacgtggagaccgatgcctacatccactgccgtcagtgccttcgtcaagctggcgcagagcgagtaccagctgctggccgacatcatccccgagcaccaccagaagaagaccttcgactccctgatacaggatgccctggatgggctgatgcttgaaggggagaacatcgtgtctgctgcccggaaggccattgtgcgacacgacttctccacggtgctcaccgtcttccccatcctgcgacacctcaagcagaccaagcctgagtttgaccaggtgctccagggcacggctgccagcacaaagaacaagctgcctggcctcatcacatccatggagaccatcggtgccaaagcgctggaggacttcgcagacaacatcaagaatgacccggacaaggagtacaacatgccgaaggacggcaccgtacacgagctcaccagcaatgccatcctcttcctgcagcagcttttggacttccaggagacggcaggcgccatgctggcctcccaagagaccagctcttcggccaccagctacagctctgagttcagcaagcggctgctaagcacctatatctgtaaagtgctgggcaacctgcagttgaacttgctgagcaagtccaaggtgtacgaggacccagctctgagcgccatcttcctgcacaacaactacaattacatcctcaagtccctggagaagtctgaactgatccagctggtggcagtgacacagaagactgctgagcgctcctaccgggagcacattgagcagcagatccagacctaccagcgcagctggttaaaggtgactgattacatcgcagagaagaatctacctgtgttccagccgggagtcaagctccgggacaaggagcggcagattatcaaggagcgttttaagggcttcaatgatggcctcgaagaactgtgcaaaatccagaaggcctgggctattccagacacagagcagagggacaggattcgccaggcccagaagaccattgtcaaggagacctacggggcctttctacagaagtttggcagcgtgcccttcaccaagaacccggagaagtacatcaagtacggggtggagcaggtgggcgacatgatcgatcgccttttcgacacctctgcctgagcctgctgctagccctgcctggttccaccagactggcgtgtcattggacagataaaccagtgttagcttgcctctgggctgggtgagcttgaagtcctctgggacagagacctgtctccacgcctccgggagctgtgtccctgagccccctagtcctggctcctgctttttccccacagcccgtgttcccagccgaaccagcactctcccggaagcctggggtccctccacaccttggcttttatgaccctgatggcttctgaaacaggaaaagagagaaggaagacagaggcctgtgcccactgctgctccatgtgtaccaagagcagcagggcagaagggccctccctccagcctaggtcagaggtggggacagagaactcccctacagcccagagatgtggcagggctcagagaagcagccagagctcctggaggaaaggcagtcgggactgaccccctctcttaaaacacattcccgcccgcccacaggcctgaggtctgggacctttccctcccaggagtcccctatgtggctgggggaggcaggctcactggccattttccctagagtccagcacactgcaggaggcgttcggaggaggagttccgccccaccctctacagccttcctcaggcccctgtctctggcccccagcctcagtgcctcttggcccagggccaggcagtcgtggttgcagaaggagcaattaggctgcctgcctgtgggctgggagacagggacaatggggaaaagttaaggagcaaaatgggggttggaagcaaaaaatagggccccacctatttaggacgagattgaagactgacccttgaggcacacttgcactggagatgggtttatttcacgctctgtgcttgtgtgctagcggagggagagctcagggtggcttaatccagaggccctgtcatggcccgcccccagccatgggaaagcaaacttcatcctaaggtgtgcagcccaggccctgcccctttacagtctaggccgcctgccatggggtgcagcctctccaggggctgcgtcagacttgcacgctgcccacatccagattcctgcaaagacgaattgggtgcacagcaccccaaccacatacacgaggaagaagatgcggtcagcagtctcaggccagcttctctgtgacccctttactcctctggagggctctgtggggagagatacagggaaaggagctgttcttcaaggtcccctcaacatgagcggaagagcgaaccccaggggtcatcagcctgtatcgcttcctttcttagattctcagctgatgaaaatttgggtctggcccatttcaggccatcttcagttgaagaaacaccctcttaggctgtgcaaggcatgggttatcaggggattgaggtcacctgggacttcagggaggctcagcttgctccctgccccagacctgtttcttctaagggaggaggacatggtggagaccagggacaggagagccagcagggtggatgcaaggggcctctacccacacctggacctccgtgccctcaccccagccctaggtgtgcacctaggcctcattccttaccccccagcccctgcccaccttcagcaggatgaggccctgggttgccgtgctctcgctgttcccctctcggggctgggctggggccgctcttggccccaaggttgccccgggccagcagcccagccagcagcacagtctctatggtgctgaggaagagcagcagcagcaggatggtgaagtagtaaactgggggaggcagggcacagggagatgctcaggggccagtccctgtgtctctggtgcccagcgagctgagcaccagtgggtgaccggggagaaacagggcagactgggtaagggagcagggcttactgagcagtgggttgcaggaggaggagctgggcagggcctgcaccagggaggagtggaggacgaggtaactcagcagcaatgtcaccttgtagcctatgcgctcaatggcccggaggggcagcaaccccccgcacacgtcagccaacagcagtgcctctgcaggcaccaagagagcgatgatggacttgagcgccgtgttcttcagcctcagctggaaggggaaaagtcagggccttcccggcgggggggaaggaggtgggcatcgggggcatggggcctggcctctggccgtgcatcctcactcccacccgcctccagcagccctctgtcggcctcctcccgacttgactcaccgtcacctggaagcagggcaccagctgctggggtgggacttgggtcttcagatcataaactacgtattccctcttgacactcacaatctcgttcaccacgtgggcctggaactctaactccatcgctgaggggtgggaatgagaactatgaaccaggaaggagagatcccagctgccaagtctgggggtagcagactggagcccaggggtgatggagacttttgatggcttttggcagggacagacttggacacaaaaccgatccatagaagggcttcccaaaccttgttttgcaacatcccaaattgtctccagttgaaggaaggcctttatcagattcatagatgagcttacattgtaaaaataaatgtactttgcaccacttcnnnnnnnnnnnnngggggcgccctttc

SEQ ID NO: 42 - DNA, 1228 bp, Homo sapiens
  CDS (473)..(736)
ctgcaggcaccggtccggaattcccgggtcgacccacgcgtccgcggacgcgtgggtaaaattggaagaactaaaagttttagattagagtcatagccttaatagccctaggtgtcatcctgggagacaggcaacagtagagatatttgagagcctaaagagaggtttggcctgtgggtttttaagtggttattgaattggtatcaggagatcctgaggctggtaggggaaggtaattctttctaagttacctctgtatttttcaagttttctataaggaatacacatacacccacatgcacacaccatagtttttatacaaacagcaataacaaaaccaaaaagatgcccctttttttgtagggataagaaatacatttgttttatacttctatgctatattttgctattcaaaatttagtgggcattacttaacattgtttctaattattttgtggctgctgtatgttttatgtgttgggagcccattgtattaggccgttcttggattgctataaagaaatacctgagactgggtaatttggttttttggttttttggggttttttttgagacggagccttgctctgtcgcccaggctggagtgcagtggcgcgatctcggctctatgcaacctccacctcctgggttcatgccattctcctgcctcagcctcccgagtagctgggactacaggcgcccgccaccatgcctggctaattttttatatttttagtagagatggggtttcaccgtatgagccaggatggtctcgatctcctgacctcatgatccacaagactgggtaatctgtaaagaaaagaggtttaattggctcatggctctgcaggctttacaggaagcatggtactggcatctgcttggtttctggggaggcctccggaagcttatagtcatggcagaaggtgaagggggagcaggcacatcacatgacaaaagcaggaacaagactcagagcaagaagtcacttatcaccaaggggatggcccaggccattcaatgaggggatcaaccttggtgctcaaaaaacctcccaccaggccccacctccagaatgggggattacatttcaatttaagtttgtgccggaacaaattacccaatttatttccccacttcaatggttcccttttcctagaatgggaggtccacgaataaattctgggcacctccaaatcttcccatgaatgcaaggggtcttttggta

SEQ ID NO: 43 - DNA, 597 bp, Homo sapiens
  CDS (230)..(475)
caatttaatacttatcgactatagggaatttggccctcgaggcaagaattcggcacgaggaaacggaaaggttcggaatttgcctctgcgccatctttttttgcctgttacctgtgacgtccttggaagcagaatctgaaactttctgaggagagcatttgagcttcagatttctaacagcctctttgcaacaaaatagaccagtagctgaaggcaactgcaatccttcatgatgtttcccttggccagaaatgcactaagcagtctcaagattcaaagcattctgcaaagcatggcaagacatagccatgtaaaacactcaccagattttcatgataaatatggtaatgctgtgctagccagtggaactgctttctgtgttgctacatgggtgtttacagccactcagattggaatagaatggaacctatcccctgttggcagagttaccccaaaagagtggaaacatcagtaaccatcacagttgctgtaatgacagaattgtttaaaaaaccaacttgtcatgtaagcactctactgcttattaaaatatagcacaattgaaaaaataaaatgtgttttaaatctttaaaaaaa

SEQ ID NO: 44 - DNA, 1394 bp, Homo sapiens
  CDS (415)..(1227)
atacgccctcggtactggcccggaattcctgggtcgacccacgcgtccgggaggctggactcccgggtctgagggatgtatgggctgggatgctggactcccgaatctgaaggaggaggggctgggggcctggactcccgagtctgagggaggagggactgaggcttctggattcctgggtctgtgggaggagggactggggctcctggattcctgggtctgtgggaagagaggagtgtctgagggaggaggggctggggacaaacttccaggtctctagccttcctggcaacgccccccgaggccggacttccaggatccagcctctattgaggatttgatgcgacggcctcacggggctttggaggtgaaagaggcccagagtagagagagagagagaccgacgtacacgggatggctacgggaacgcgctatgccgggaaggtggtggtcgtgaccgggggcgggcgcggcatcggagctgggatcgtgcgcgccttcgtgaacagcggggcccgagtggttatctgcgacaaggatgagtctgggggccgggccctggagcaggagctccctggagctgtctttatcctctgtgatgtgactcaggaagatgatgtgaagaccctggtttctgagaccatccgccgatttggccgcctggattgtgttgtcaacaacgctggccaccacccacccccacagaggcctgaggagacctctgcccagggattccgccagctgctggagctgaacctactggggacgtacaccttgaccaagctcgccctcccctacctgcggaagagtcaagggaatgtcatcaacatctccagcctggtgggggcaatcggccaggcccaggcagttccctatgtggccaccaagggggcagtaacagccatgaccaaagctttggccctggatgaaagtccatatggtgtccgagtcaactgtatctccccaggaaacatctggaccccgctgtgggaggagctggcagccttaatgccagaccctagggccacaatccgagagggcatgctggcccagccactgggccgcatgggccagcccgctgaggtcggggctgcggcagtgttcctggcctccgaagccaacttctgcacgggcattgaactgctcgtgacggggggtgcagagctggggtacgggtgcaaggccagtcggagcacccccgtggacgcccccgatatcccttcctgatttctctcatttctacttggggcccccttcctaggactctcccaccccaaactccaacctgtatcagatgcagcccccaagcccttagactctaagcccagttagcaaggtgccgggtcaccctgcaggttcccataaaaacgatttgcagccagaaaaaaaaaaaa

SEQ ID NO: 45 - DNA, 773 bp, Homo sapiens
  CDS (256)..(489)
  misc_feature (1)...(773): n = a,t,c or g
ccactttgtacaagaaagctgggtacgcgtaagcttgggcccctcgagggatactctagagcggccgccctttttttttttttttagacggagtctcactctgtcacccaggctggagtgcagtggtgccattttggctcactgcagaggtttctgcctcccgggttcaagcgattctcctgcctcatcctcctgagtagctgggactataggccaggccaccatgcccggctaatttttgtattttcagtagagatggggtttcaccatgtttgccaggctggtctcgaactcctgacctcaggtgatccacccgcctcagcctcccaaagtgctgggattacaggcatgagccaccacgcccagcctaaccatggactcttatttccttccctgcagacatatcaaaatttaaagaaaaggttggatattacttgggcattggtccctgtttccattttgatgataactgcaggactgagtagttaactaattatgacatcttctcacttcttttctcaatataaataaccaaacatcaactctgtaaacatttagaactcttgaacanttcanagtttcaaatacactcacgagaaatgaagatgtggtcttgtacaaagaacctgtgcatgtaggtagacactgaagtcacttccaaggcacataaggcataacctacctgctctcatagagcctttccctgccagtcgaacgaggccctttctttccaacatgaaactccctccattgaaaatgctggagcctcatac

SEQ ID NO: 46 - DNA, 2073 bp, Homo sapiens
  CDS (561)..(1346)
  misc_feature (1)...(2073): n = a,t,c or g
tatattttaaaaaccagcaagtaaacgggaaagggaggaagcaagaagcacttcgaggtgccagcgagcaccctggcgtccaagagcagcgcgcgggacccgctgagcccagggcccgggccgagctccgcccctttctccaggctccccgccnccggagggagagagggaggacccgtcacaggtaacgatgcgcccagtgagcgtcctttcctctggggccaaccagcgtctccgcgccgctgccgccaacctcgcgccgaactacgccctgagatttgggcgggtagcgattgggggaaaacaggcaacctaagagttattaccgttagcagcgaagactgcgactaacgtcaacgacggagactgcgtctgccttcgcttccgcctcgtagccccgggaaccggaaatccgtctgccccgggtcacgtgcttaggagccatattgtcgctagtggccgctggggctgggaggggtgtgctagagaggcgcagcttctctgggcgtggtttttatcctgggggaaggatcggtggaatgtgaggggaggtggaggagatggcggcgacggcccgggaagatggcgccagcggtcaagagcgaggtcagcggggctgcgagcactatgacagaggatgtctcctaaaggcaccttgctgtgacaagctttatacttgccgcttgtgtcatgataacaatgaagatcatcaactagatcgctttaaagtgaaggaagtgcagtgcataaactgtgaaaaaattcaacatgcccaacagacttgtgaagaatgtagcacattgtttggagaatattattgcgatatatgccatttgtttgacaaagataagaagcagtatcactgtgaaaactgtggaatttgtaggattggtccaaaggaagattttttccattgtttgaaatgtaacttatgcctagctatgaatcttcaaggaagacacaagtgtattgaaaatgtgtcccgacagaattgtccaatatgtttggaggacattcacacatcccgtgttgttgctcatgtcttgccatgtggacatcttttacatagaacgtgttatgaagaaatgttgaaagaaggctacagatgtccattatgtatgcactctgctttagatatgaccaggtattggagacagctggatgatgaagtagcacagactcctatgccatcagaatatcagaacatgactgtggatattctctgcaatgactgtaatggacgatccactgttcagtttcatatattaggcatgaaatgtaagatttgtgaatcctataatactgctcaagctggaggacgtagaatttcactggatcagcaatgacgagcctacacagtactggagaacttggcattttctgatatagaaaaaggctttccttggtatcgtgttatcatgtgtcgtcatctatgcattagagttgatgtgttttgtactagtgtcacagcataaaatcatattacaagtacgtaaggattcagggtctcttgatagacttatcatagctctatattgaatgaaagccactgtgcttgtgttttgattggaaattcctttagtgtcagttttttggaagccaatgatgtttgccactgatacattcatagaagtgtattatattttcatgaagctttgctttaagtgacactacgcgtgcagttcatttctagttcttgatagaactgcacttaattttcagtagtagtcttgactttttaagggctgtgttatattaagttctcccttactgttaaaacctaattaaatatgctttagaattttctaagacagtcctctggatcctctaaatgtgaattttgatgtaataactgctaataaaattatattgaaactgttttatagaaagttttttccaaagttttctatgtttggctcaattagggcagtatcatcagttctataatgtaaaagaaattttctttcttttgaggtattccataaaagtagttgggaaaattattatgtaaaataataagactcttccaaagccttaataaaaacatcaacattgaaaacaaaaaaaaaaaaa

SEQ ID NO: 47 - DNA, 1565 bp, Homo sapiens
  CDS (874)..(1449)
aattgaaattcgaacgcctgcggtaccggtccggaattcccgggtcgacccacgcgtccgcggacgcgtgggcagcgtcggaagtggaagctgaacctgattgcagagttggagtccagagttctggctgagcctgtccctctgccagccgagtgagtgcatggctgcccccctagggcctgttttacttgagttcaacagcagagccctggcttctgctggccagcttgccccttttggtgggacttttagtcactgccttgacctcaggtgggagctctcattatcagtcatctgttgggcttgctgttgacacctgactgcccttgtgaagctacctgagaccgcctcctgacatatggaggaaagtcttattttgagtcctgggtgtcacccttttttcaggtatagtaaacttatcctccacagggcccaaggccctgtggctgagggcagataatgtaggtctcaccgtgaggtggtcgtttgaaaaagtgccctgaatgatttgtctgctctctccctagaatatgccctacagagataggtatattcagccacattttccattcagggtagcaaacagtatgccagatttggcttgcagatggggttttggcccacatattttttaaaatttcacataaaatattcattgaggagtccagatttttagcctctcttgtaaagttggactctggcagtgcagatccacattcccacatggcatcaaagttcccctttgaagagcacgccctttgcctttctccttcacttgtctggccctggtgggctgtgtagtctgccaccctcaggggattcgttttccagccaaaccttgctcggccactgttcttatctccatgcagcccaatggaactgaaaaatctggagtataggccagtgaaggtcagggggtgctttgaccattccaaggagctgtatatgatgccccggaccatggtggaccctgtccgggaggcccgggagggcggcctcatctcctcctcaactcagagtggggcctatgtggtcactcccttccactgcaccgacctgggagtcaccatcctggtaaatagagggttcgttcccaggaagaaagtgaatcctgaaacccggcagaaaggccagattgagggagaagtggacctcattgggatggtgaggctgacagaaaccaggcagccttttgtccctgagaacaatccagaaaggaaccactggcattatcgagacctggaagctatggccagaatcacaggcgcagagcccatcttcattgatgccaacttccagagcacagtccctggaggacccattggagggcaaaccagagttactctgaggaacgagcatctgcagtacatcgtgacctggtatggactctctgcagctacatcctacctgtggtttaagaaattcctacgtgggacacctggtgtgtgacagatcagctgctgaagccctgtccctggataatgcagtatttcaagactgcctttatgctggatcatgtgctactggtataaagttctggccttctaccttaaaaaaaaaaaaaa

SEQ ID NO: 48 - DNA, 1781 bp, Homo sapiens
  CDS (344)..(1402)
  misc_feature (1)...(1781): n = a,t,c or g
ttccattgaacgcctgcgttaccggtccggaattcccgggtcgacccacgcgtccgactagttctagatcgcgagcggccgctcgcgatctataatgcctcttctgaagcagccatcccggcctcttggtactgctgaccccagccaggctacagggatcgattggagctgtccttggggctgtaattggccccagctgagcagggcaaacactgaggtcaactacaagccacaggccccttccccagcctcagttcacagctgccctgttgcagggaggcggtggcccttctgttgctagaccgagcctgtgggatataccaaggcagaggagcccatagccatgaggagcctcggggccctgctcttgctgctgagcgcctgcctggcggtgagcgctggccctgtgccaacgccgcccgacaacatccaagtgcaggaaaacttcaatatctctcggatctatgggaagtggtacaacctggccatcggttccacctgcccctggctgaagaagatcatggacaggatgacagtgagcacgctggtgctgggagagggcgctacagaggcggagatcagcatgaccagcactcgttggcggaaaggtgtctgtgaggagacgtctggagcttatgagaaaacagatactgatgggaagtttctctatcacaaatccaaatggaacataaccatggagtcctatgtggtccacaccaactatgatgagtatgccattttcctgaccaagaaattcagccgccatcatggacccaccattactgccaagctctacgggcgggcgccgcagctgagggaaactctcctgcaggacttcagagtggttgcccagggtgtgggcatccctgaggactccatcttcaccatggctgaccgaggtgaatgtgtccctggggagcaggaaccagagcccatcttaatcccgagagtccggagggctgtgctaccccaagaagaggaaggatcagggggtgggcaactggtaactgaagtcaccaagaaagaagattcctgccagctgggctactcggccggtccctgcatgggaatgaccagcaggtatttctataatggtacatccatggcctgtgagactttccagtacggcggctgcatgggcaacggtaacaacttcgtcacagaaaaggagtgtctgcagacctgccgaactgtggcggcctgcaatctccccatagtccggggcccctgccgagccttcatccagctctgggcatttgatgctgtcaaggggaagtgcgtcctcttcccctacgggggctgccagggcaacgggaacaagttctactcagagaaggagtgcagagagtactgcggtgtccctggtgatggtgatgaggagctgctgcgcttctccaactgacaactggccggtctgcaagtcagaggatggccagtgtctgtcccggggtcctgtggcaggcagcgccaagcaacctgggtccaaataaaaactaaattgtaaactcctaaaaaaaaaaaaaaaaaaaaaaaagggggggccgtttaaaagaatcaaattttacttccccgggaatgaaaaaaaaaattttttttatggggcccccaaaattaaatccctgggccggcttttaaaaacgcgggaaggggaaaaacctgggggtacccaaattaaatccctttgaaaaaaatccccttttccccggggggggaaaaacaaaaaagcgccggnnnnnnnnnnttnnnnnnnttcnttgaatataatctcggccacccccaaa

SEQ ID NO: 49 - DNA, 3142 bp, Homo sapiens
  CDS (112)..(2337)
tcctggtacgcctgcaggtaccggtccggaattcccgggtcgacccacgcgtccgcccacgcgtttttgacgcgcgcgatttaaaaccagctcaggagacgccaaggaaagatgggacctcccggcccagcactgccagccacaatgaataactcttcttcagagacgcgaggacacccccacagtgcctcctctccttcagagcgtgtgttcccgatgcccctgcccaggaaggcgcctctcaatattcctggcaccccagtcctcgaagactttcctcagaatgacgatgagaaggagcggctgcagcggaggcgctcgagggtctttgatctgcagttcagcactgactcacctcgcttattggcctccccctccagcaggagtattgacatttcagctactatccccaagtttacaaacacgcagattacggaacattactccacctgtatcaaactgtccactgaaaataaaatcactaccaagaatgcttttggtttgcacttgattgattttatgtcagagattcttaaacagaaagacaccgaaccaaccaactttaaagtggctgcgggtactctggatgccagcaccaagatctatgctgtgcgcgtggatgccgtccatgccgatgtatacagagtccttggggggctgggcaaagatgcaccgtctttggaagaagtagaaggccatgttgctgatggaagtgctactgaaatgggaacaaccaaaaaggctgtaaagccaaagaagaagcacttacacagaactattgagcagaacataaacaacctcaatgtctccgaagcagatcggaagtgtgagattgatcccatgtttcagaagacagcagcctcatttgatgagtgcagcacagcaggggtgtttctgtccactctccactgccaggactacagaagtgaactgctgtttccctctgatgtccagactctctccacgggagaacctctcgagttgccagagttaggttgtgtagaaatgacagatttaaaagcgcccttgcagcagtgtgcagaagatcgccagatctgcccttccctggccgggttccagtttacacagtgggacagtgaaacacataatgagtctgtgtcggccctggtagacaagtttaagaagaatgaccaggtatttgacatcaatgctgaagttgacgagagtgactgtggagacttccccgatgggtccctgggggatgactttgatgccaacgatgaacctgaccacaccgcagttggggatcatgaagagttcaggagctggaaggagccctgccaggttcagagctgccaggaagaaatgatttcccttggggatggagacatcaggaccatgtgcccccttctgtctatgaaacctggagaatattcttatttcagtcctcggaccatgtcgatgtgggctggcccggatcactggcgctttaggcctcgacgcaaacaagatgctccttcccaatcagaaaacaaaaagaagagtacaaaaaaagattttgaaattgactttgaagatgatattgactttgatgtatattttagaaaaacaaaggctgctactattctgaccaagtccactttggagaaccagaattggagagctaccacccttcctacagatttcaactacaatgttgacactctggtccagcttcacctcaaaccaggcaccaggttacttaagatggcccagggccatagggcagagactgagcattatgaagaaattgaagactatgattacaacaaccctaacgacacctccaacttttgccctggattacaggctgctgacagtgatgatgaagatttggatgacttatttgtgggacctgttgggaactctgacctctcaccttatccttgccatccacctaagacagcacaacagaatggtgacactccagaagcccaaggattagacatcacaacatatggggagtcaaacttggtagctgagcctcagaaggtaaataaaattgaaattcactatgccaagactgccaaaaagatggacatgaagaaactgaagcagagcatgtggagtctgctgacagcgctctccggaaaggaggcagatgcagaggcaaaccacagggaagctggaaaagaagcggccctggcagaagtggctgacgagaagatgcttagcgggctcacgaaggacctgcagaggagcctgccccctgtcatggctcagaacctctccatacctctggcttttgcctgtctcctacatttagccaatgaaaagaatctaaaactggaaggaacagaggacctctctgatgttcttgtgaggcaaggagattgagttcactatggagaagtcagcagcaggaggcccatcccttactcagttgccgggacatccccagtctcgggggaagaagatgccatgggcttatacccaggctgtagccaactaccaacgtgcctgtttgtttgttgctctttccttctctccatcatagtctgggtgccagcgccctgaagctccgtgctcaactgattaaactttactgccctatggtgaccatctaggagaggggagggcagagggggtgagggtactattctggattgagaaaacctatatccattctttatatcaatgtatagttttagtctcctaaattgatctgttattttccaaactattctcttgtagaaaattttccagtgggcacttaatggtgcccttgaagaacttcctaatccatgtacataaaatacatcatatgtacacttataaatgtatatagaatgctcaaaaataaaattcttaataatagaactggcaaaatatttgagtgtccactagatgagtatcagacctagtccttacccttagggggatgcagtcctggttgttatccaggatacacacctgtcagtataaggcagaagatgcctaagggccaagatggtttgcctcggaggagaatggaagagagagattgctgactggacattcagatgcaagactgggtcctgcttaaatcccaggattctgctggagggagctgatagtgatacttgtcccttctgtacattgcttcatgtagccttctcagcatccctaggagaaacttactattgtgactctcatgttggag

SEQ ID NO: 50 - DNA, 2535 bp, Homo sapiens
  CDS (85)..(2265)
gcacgaggcgacttccggggcggcggttgcatcagattctaggaagtgtctgtagccgcagctgcgggtccgggattcccagccatggcagattcctccgggcagcagggcaaaggccggcgtgtgcagccccagtggtcccctcctgctgggacccagccatgcagactccacctttacaacagcctcaccaggaacaaggaagtgttcatacctcaagatgggaaaaaggtgacgtggtattgctgtgggccaaccgtctatgacgcatctcacatggggcacgccaggtcctacatctcttttgatatcttgagaagagtgttgaaggattacttcaaatttgatgtcttttattgcatgaacattacggatattgatgacaagatcatcaagagggcccggcagaaccacctgttcgagcagtatcgggagaagaggcctgaagcggcacagctcttggaggatgttcaggccgccctgaagccattttcagtaaaattaaatgagaccacggatcccgataaaaagcagatgctcgaacggattcagcacgcagtgcagcttgccacagagccacttgagaaagctgtgcagtccagactcacgggagaggaagtcaacagctgtgtggaggtgttgctggaagaagccaaggatttgctctctgactggctggattctacacttggctgtgatgtcactgacaattccatcttctccaagctgcccaagttctgggagggggacttccacagagacatggaagctctgaatgttctccctccagatgtcttaacccgggttagtgagtatgtgccagaaattgtgaactttgtccagaagattgtggacaacggttacggctatgtctccaatgggtctgtctactttgatacagcgaagtttgcttctagcgagaagcactcctatgggaagctggtgcctgaggccgttggagatcagaaagcccttcaagaaggggaaggtgacctgagcatctctgcagaccgcctgagtgagaagcgctctcccaacgactttgccttatggaaggcctctaagcccggagaaccgtcctggccgtgcccttggggaaagggtcgtccgggctggcatatcgagtgctcggccatggcaggcaccctcctaggggcttcgatggacattcacggaggtgggttcgacctccggttcccccaccatgacaatgagctggcacagtcggaggcctactttgaaaacgactgctgggtcaggtacttcctgcacacaggccacctgaccattgcaggctgcaaaatgtcaaagtcactaaaaaacttcatcaccattaaagatgccttgaaaaagcactcagcacggcagttgcggctggccttcctcatgcactcgtggaaggacaccctggactactccagcaacaccatggagtcagcgcttcaatatgagaagttcttgaatgagtttttcttaaatgtgaaagatatccttcgcgctcctgttgacatcactggtcagtttgagaagtggggagaagaagaagcagaactgaataagaacttttatgacaagaagacagcaattcacaaagccctctgtgacaatgttgacacccgcaccgtcatggaagagatgcgggccttggtcagtcagtgcaacctctatatggcagcccggaaagccgtgaggaagaggcccaaccaggctctgctggagaacatcgccctgtacctcacccatatgctgaagatctttggggccgtagaagaggacagctccctgggattcccggtcggagggcctggaaccagcctcagtctcgaggccacagtcatgccctaccttcaggtgttatcagaattccgagaaggagtgcggaagattgcccgagagcaaaaagtccctgagattctgcagctcagcgatgccctgcgggacaacatcctgcccgagcttggggtgcggtttgaagaccacgaaggactgcccacagtggtgaaactggtagacagaaacaccttattaaaagagagagaagaaaagagacgggttgaagaggagaagaggaagaagaaagaggaggcggcccggaggaaacaggaacaagaagcagcaaagctggccaagatgaagattccccccagtgagatgttcttgtcagaaaccgacaaatactccaagtttgatgaaaatgtaagcatggtctgcccacacatgacatggagggcaaagagctcagcaaagggcaagccaagaagctgaagaagctcttcgaggctcaggagaagctctacaaggaatatctgcagatggcccagaatggaagcttccagtgagggggcacaggactgactttttaaaccattgtggactagtggctgctgtctgcctcagtgacaatgtcccagcgctcctatcatgtttacagtcacccttgggtcctaaattaagagttgtgttcatgtaggttcgtgtcgtcgttggctctgagacattgataataaatttttctcaacagtgaaaaaaaaaaaa

SEQ ID NO: 51 - DNA, 909 bp, Homo sapiens
  CDS (121)..(672)
atttggccctcgaggccaagaattcggcacgagggcgcggagggccggagacgctgcagacccgcgacccggagcagctcggaggcggtgaataatagctcttcaagtctgcaataaaaaatggcctccaacaaaactacattgcaaaaaatgggaaaaaaacagaatggaaagagtaaaaaagttgaagaggcagagcctgaagaatttgtcgtggaaaaagtactagatcgacgtgtagtgaatgggaaagtggaatatttcctgaagtggaagggatttacagatgctgacaatacttgggaacctgaagaaaatttagattgtccagaattgattgaagcgtttcttaactctcagaaagctggcaaagaaaaagatggtacaaaaagaaaatctttatctgacagtgaatctgatgacagcaaatcaaagaagaaaagagatgctgctgacaaaccaagaggatttgccagaggtcttgatcctgaaagaataattggtgccacagacagcagtggagaattgatgtttctcatgaaatggaaagattcagatgaggcagacttggtgctggcgaaagaggcaaatatgaagtgtcctcaaattgtaattgctttttatgaagagagactaacttggcattcttgtccagaagatgaagctcaataattgttcacattgttcttttatatatatttatatatatatataaaaattgggtcttagattttgatttactagtgtgacaaaataactacatcctaatgaaaatcaagtttgatatgtttgttttgaaagtagcgttggaagagttgttgggggttttttgcatccatagcactggttactttgaacaaataaataaaagctttctgtagttgcttcctttatcagaaaaaaaaaaaa

SEQ ID NO: 52 - DNA, 1553 bp, Homo sapiens
  CDS (83)..(1201)
gcacgaggtcccgccgccgcccgctgcgtccgcccagcgccactccgcgtcccgaccggcccgcggcagcctgcgccgcgccatggccacctccccgcagaagtcgccttctgtccccaagtctcccactcccaagtcgcccccgtcccgcaagaaagatgattccttcttggggaaactcggagggaccctggcccggaggaagaaagccaaggaggtgtccgagctgcaggaggagggaatgaacgccatcaacctgcccctcagcccaattccctttgagctggaccccgaggacacgatgctggaggagaatgaggtgcgaacaatggtggatccaaactcacgcagtgaccccaagcttcaagaactgatgaaggtattaattgactggattaatgatgtgttggttggagaaagaatcattgtgaaagacctagctgaagatttgtatgatggacaagtcctgcagaagcttttcgagaaactggagagtgagaagctaaatgtggctgaggtcacccagtcagagattgctcagaagcaaaaactgcagactgtcctggagaagatcaatgaaaccctgaaacttcctcccaggagcatcaagtggaatgtggattctgttcatgccaagagcctggtggccatcttacacctgctcgttgctctgtctcagtatttccgtgcaccaattcgactcccagaccatgtttccatccaagtggttgtggtccagaaacgagaaggaatcctccagtctcggcaaatccaagaggaaataactggtaacacagaggctctttccgggaggcatgaacgtgatgcctttgacaccttgttcgaccatgccccagacaagctgaatgtggtgaaaaagacactcatcactttcgtgaacaagcacctgaataaactgaacctggaggtcacagaactggaaacccagtttgcagatggggtgtacctggtgctgctcatggggctcctggagggctactttgtgcccctgcacagcttcttcctgaccccggacagctttgaacagaaggtcttgaatgtctcctttgcctttgagctcatgcaagatggagggttggaaaagccaaaaccgcggccagaagacatagtcaactgtgacctgaaatctacactacgagtgttgtacaacctcttcaccaagtaccgtaacgtggagtgaggggctgccctgggcccaccactgcccaagagttcttgctgttggcgtactggaccctcctccgaactgccttaccctgcttattcctgtctcttgcactgtgctctcccacaagtccagctgcaacccagagatagtggaaactgaaattaggaaggaaatcatcaataactcagtgggctgacccatccctcccaggcgctggggaccaacctagcaatgaaggttgggaaggttgttcccttcccggtgccaggtccagatttccctccatgatttgggaaccagcttaggcaaaagagtccccacaagatgaaaataaagatcctagttaccattcaaaaaaaaaaaa

SEQ ID NO: 53 - DNA, 932 bp, Homo sapiens
  CDS (51)..(338)
cggccagtgaattgaatttaggtgacactatagaagagctatgacgtcgcatgcacgcgtacgtaagcttggatcctctagagcggccgcgacctactactactacaattcgcggccgctcagacgccgccgccatgatcatccctgtacgctgcttcacttgtggcaagatcgtcggcaacaagtgggaggcttacctggggctgctgcaggccgagtacaccgagggggacgcgctggatgccctgggcctgaagcgctactgctgccgccggatgctgctggcccacgtggacctgatcgagaagctgctcaattatgcacccctggagaagtgaccacgctgaaacccacccacccgctgtgctgaccatgggccctgagcgtcctgccccgaattcacgaggctgaggcatccgggagctggcgtaatgcctggccgcagtgtgtgtgtatcccataccccactctggaaggaaccatccagtaaaggtctttcagaaccactaaggtcccagccctcactaggatgtcaggagccaggtctaggcccagctttcacactgtggcagcccagtgaagcagactgggccatgaactctcctagccctggggccagcctgttccacaggcacccctgcaggaggcgctgccaggagagccttccatctcggggctctttgaggttccctccttctgggtgttcttcaggctgagcagagaggctcctgtaccctctctctcggaatctgaagagccagatttaggccgggcaaaggggctcacccctataatcccaggactttgggaggccaaggcaggaggatcacttgagtccagaaattcaagacccgcctgggcatcataatgagaccccatctctacaacaaaatttaataaattagctgggcacagtgttcaaaaaaaaaaaa

SEQ ID NO: 54 - DNA, 883 bp, Homo sapiens
  CDS (164)..(811)
attgaacgcctgcggaattcgtacgaggctctctctctctctctctctctctctctctcctgaggctgctccagcagggcgccgccgccgtctcctggggcggcttggggtagccgggagatcctgtgccttcaaaccctacgagtccatactttaaaacaaaatgaagaaagtaaggcttaaggaactagagagtcgcctgcaacaagtggatggatttgaaaagcccaagctacttctggaacagtatcctaccaggccgcacattgcagcatgtatgctctatacaatccataacacttatgatgacattgaaaataaagtcgttgcagatctaggatgtggttgtggagtacttagcatcggaactgcaatgttaggagcagggttgtgtgttggatttgacatagatgaagacgcattggaaatatttaataggaatgcagaagagtttgagttaacaaatattgacatggttcaatgtgatgtgtgcttattatctaacagaatgtccaagtcattcgatacagtaattatgaatcctccctttgggaccaaaaataataaagggacagatatggcttttctaaagactgctttggaaatggcaagaacagcagtatattccttacacaaatcctcaactagagaacatgttcaaaagaaagctgcagaatggaaaatcaagatagatattatagcaggtggcttttgttttacagaacttcgatatgacctgccagcatcatacaagtttcacaaaaagaaatcagtggacattgaagtggacctaattcggttttccttttaaaagccccgcaaacaaaagtcgtttaaaacctatttaaaatgaataaaaaattggtttactaaaaaaaaaaaa

SEQ ID NO: 55 - DNA, 963 bp, Homo sapiens
  CDS (218)..(661)
gatccattctacgtctgtgtatgaggtatacttttctttacgcttctgtggtcgtattctgctctataaatggactcgcaacttgaaaacattttgaacgcctgcggtaccggaccggaattcccgggtcgacccacgcgtccggcagccggagcgcacccggccggaagccgctgtcggggagccggcggtggggctggacgcaggtgcaactgacatgggtgaaccccagggatccatgcggattctagtgacagggggctctgggctggtaggcaaagccatccagaaggtggtagcagatggagctggacttcctggagaggactgggtgtttgtctcctctaaagacgccgatctcacggatacagcacagacccgcgccctgtttgagaaggtccaacccacacacatcatcctctccgtgggcgaggaagatgaggtctccatcaaggaggcagccgaggcggtggtggaggccatggacttccatggggaagtcacctttgatacaaccaagtcggatgggcagtttaagaagacagccagtaacagcaagctgaggacctacctgcccgacttccggttcacacccttcaagcaggcggtgaaggagacctgtgcttggttcactgacaactacgagcaggcccggaagtgaagctggaagacaggatcaggtgccagcggaccatcggctggcagagcccagcggccaccacccgtcaaccctgccaggagctgagggcaccacccagcaacctgggcctgcattccatccgctctgcagccccaagcatctttccagtggggcccccattcacgttggtcctcagggaaaccagggtccggggcaggcccggcgctttgctccccacaccagccccctgcgcgtgtccactctgatcctgcatcccactccctgggagccaataaagtgcattttcacagaaaaaaaaaaaa

SEQ ID NO: 56 - DNA, 3521 bp, Homo sapiens
  CDS (201)..(2546)
gtggcagcagcgttggcccggccccgggagcggagagcgaggggaggcggagacggaggaaggtctgaggagcagcttcagtccccgccgagccgccaccgcaggtcgaggacggtcggactcccgcggcgggaggagcctgttcccctgagggtatttgaagtataccatacaactgttttgaaaatccagcgtggacaatggctactcaagctgatttgatggagttggacatggccatggaaccagacagaaaagcggctgttagtcactggcagcaacagtcttacctggactctggaatccattctggtgccactaccacagctccttctctgagtggtaaaggcaatcctgaggaagaggatgtggatacctcccaagtcctgtatgagtgggaacagggattttctcagtccttcactcaagaacaagtagctgatattgatggacagtatgcaatgactcgagctcagagggtacgagctgctatgttccctgagacattagatgagggcatgcagatcccatctacacagtttgatgctgctcatcccactaatgtccagcgtttggctgaaccatcacagatgctgaaacatgcagttgtaaacttgattaactatcaagatgatgcagaacttgccacacgtgcaatccctgaactgacaaaactgctaaatgacgaggaccaggtggtggttaataaggctgcagttatggtccatcagctttctaaaaaggaagcttccagacacgctatcatgcgttctcctcagatggtgtctgctattgtacgtaccatgcagaatacaaatgatgtagaaacagctcgttgtaccgctgggaccttgcataacctttcccatcatcgtgagggcttactggccatctttaagtctggaggcattcctgccctggtgaaaatgcttggttcaccagtggattctgtgttgttttatgccattacaactctccacaaccttttattacatcaagaaggagctaaaatggcagtgcgtttagctggtgggctgcagaaaatggttgccttgctcaacaaaacaaatgttaaattcttggctattacgacagactgccttcaaattttagcttatggcaaccaagaaagcaagctcatcatactggctagtggtggaccccaagctttagtaaatataatgaggacctatacttacgaaaaactactgtggaccacaagcagagtgctgaaggtgctatctgtctgctctagtaataagccggctattgtagaagctggtggaatgcaagctttaggacttcacctgacagatccaagtcaacgtcttgttcagaactgtctttggactctcaggaatctttcagatgctgcaactaaacaggaagggatggaaggtctccttgggactcttgttcagcttctgggttcagatgatataaatgtggtcacctgtgcagctggaattctttctaacctcacttgcaataattataagaacaagatgatggtctgccaagtgggtggtatagaggctcttgtgcgtactgtccttcgggctggtgacagggaagacatcactgagcctgccatctgtgctcttcgtcatctgaccagccgacaccaagaagcagagatggcccagaatgcagttcgccttcactatggactaccagttgtggttaagctcttacacccaccatcccactggcctctgataaaggctactgttggattgattcgaaatcttgccctttgtcccgcaaatcatgcacctttgcgtgagcagggtgccattccacgactagttcagttgcttgttcgtgcacatcaggatacccagcgccgtacgtccatgggtgggacacagcagcaatttgtggagggggtccgcatggaagaaatagttgaaggttgtaccggagcccttcacatcctagctcgggatgttcacaaccgaattgttatcagaggactaaataccattccattgtttgtgcagctgctttattctcccattgaaaacatccaaagagtagctgcaggggtcctctgtgaacttgctcaggacaaggaagctgcagaagctattgaagctgagggagccacagctcctctgacagagttacttcactctaggaatgaaggtgtggcgacatatgcagctgctgttttgttccgaatgtctgaggacaagccacaagattacaagaaacggctttcagttgagctgaccagctctctcttcagaacagagccaatggcttggaatgagactgctgatcttggacttgatattggtgcccagggagaaccccttggatatcgccaggatgatcctagctatcgttcttttcactctggtggatatggccaggatgccttgggtatggaccccatgatggaacatgagatgggtggccaccaccctggtgctgactatccagttgatgggctgccagatctggggcatgcccaggacctcatggatgggctgcctccaggtgacagcaatcagctggcctggtttgatactgacctgtaaatcatcctttaggagtaacaatacaaatggattttgggagtgactcaagaagtgaagaatgcacaagaatggatcacaagatggaatttatcaaaccctaaccttgcttggttaaatttttttttttttttttttaagaatatctgtaatggtactgactttgcttgctttgaagtagctcttttttttttttttttttttttgcagtaactgttttttaagtctctcgtagtgttaagttatagtgaatactgctacagcaatttctaatttttaagaattgagtaatggtgtagaacactaattcataatcactctaattaattgtaatctgaataaagtgtaacaattgtgtagcctttttgtataaaatagacaaatagaaaatggtccaattagtttcctttttaatatgcttaaaataagcaggtggatctatttcatgtttttgatcaaaaactatttgggatatgtatgggtagggtaaatcagtaagaggtgttatttggaaccttgttttggacagtttaccagttgccttttatcccaaagttgttgtaacctgctgtgatacgatgcttcaagagaaaatgcggttataaaaaatggttcagaattaaacttttaattcattcgattgtgtcactctttctttttttcttgtcattaataaatggtttgtgagggtggtaagtaagtttatccaactcaactttatcctgaactttatcctgagatagatagatacatagtgaagtaatttgttgtagcgatagagagggccctacttctctagatgcaatttgccaagtttctttagcatttggccctggattacgctggacccctaaaaaagtgtttcagccttgcacattgtgattagttctgggctttggtgggagaaagccaagcagactatccatctatctctacccggacgcgtgggtcgacccgggaattccggaccggcctaaa

SEQ ID NO: 57 - DNA, 3766 bp, Homo sapiens
  CDS (259)..(3714)
cctttcctgttctgattggttgcttacgtgagcgtgactactttcttgcctcatgattggctgaaatcagtagcgtcatcggcggccgggagggcggagggacgagggaagtcggcgagagggagactgggttgggggaggggttcaggcctgttccccgcggctgcggcagcaccagggccggccgccaccgcctctagaacgcggaggaggtgggtcctgggaagcgggatgtccatcgctccagcttggtggtgaatgctgaggagagtcactgttgctgcagtctgtgccacccggaggaagttgtgtgaggccgggcgggagctcgcggcgctctggggaatcgaaacgcggggtcggtgcgaagactctgctgctgccagaccctttcctattctggccatgcctggaaggaacaaggcgaagtctacctgcagctgccctgacctgcagcccaatggacaggatctgggcgagaacagccgggttgcccgtctaggagcggatgaatctgaggaagagggacggagggggtctctcagtaatgctggggaccctgagatcgtcaagtctcccagcgaccccaagcaataccgatacatcaaattacagaatggcttgcaggcacttctgatttcagacctaagtaatatggaaggtaaaacaggaaatacaacagatgatgaagaagaagaggaggtggaggaagaagaagaagatgatgatgaagattctggagctgaaatagaagatgacgatgaagagggttttgatgatgaagatgagtttgatgatgaacatgatgatgatcttgatactgaggataatgaattggaagaattagaagagagagcagaagctagaaaaaaaactactgaaaaacagtctgcagcggctctttgtgttggagttgggagtttcgctgatccagatgacctgccggggctggcacactttttggagcacatggtattcatgggtagtttgaaatatccagatgagaatggatttgatgccttcctgaagaagcatgggggtagtgataatgcctcaactgattgtgaacgcactgtctttcagtttgatgtccagaggaagtacttcaaggaagctcttgatagatgggcgcagttcttcatccacccactaatgatcagagatgcaattgaccgtgaagttgaagctgttgatagtgaatatcaacttgcaaggccttctgatgcaaacagaaaggaaatgttgtttggaagccttgctagacctggacatcctatgggaaaatttttttggggaaatgctgagacgctcaagcatgagccaagaaagaataatattgatacacatgctagattgagagaattctggatgcgttactactcttctcattacatgactttagtggttcaatccaaagaaacactggatactttggaaaagtgggtgactgaaatcttctctcagataccaaacaatgggttacccagaccaaactttggccatttaacggatccatttgacacaccagcatttaacaaactttatagagttgttccaatcagaaaaattcatgctctgaccatcacatgggcacttcctcctcaacagcaacattacagggtgaagccacttcattatatatcctggctggttggacatgaaggcaaaggcagcattctttctttccttaggaaaaaatgctgggctcttgcactgtttggtggaaatggtgagacaggatttgagcaaaattctacttattcagtgttcagcatttctattacattgactgatgagggttatgaacatttttatgaggttgcttacactgtctttcagtatttaaaaatgctgcagaagctaggcccagaaaaaagaatttttgaagagattcggaaaattgaggataatgaatttcattaccaagaacagacagatccagttgagtatgtggaaaacatgtgtgagaacatgcagctgtacccattgcaggacattctcactggagatcagcttctttttgaatacaagccagaagtcattggtgaagccttgaatcagctagttcctcaaaaagcaaatcttgttttactgtctggtgctaatgagggaaaatgtgacctcaaggagaaatggtttggaactcaatatagtatagaagatattgaaaactcttgggctgaactgtggaatagtaatttcgaattaaatccagatcttcatcttccagctgaaaacaagtacatagccacggactttacgttgaaggctttcgattgcccggaaacagaatacccagttaaaattgtgaatactccacaaggttgcctgtggtataagaaagacaacaaattcaaaatccccaaagcatatatacgtttccatctaatttcaccgttgatacagaaatctgcagcaaatgtggtcctctttgatatctttgtcaatatccttacgcataaccttgcggaaccagcttatgaagcagatgtggcacagctggagtataaactggtagctggagaacatggtttaattattcgagtgaaaggatttaaccacaaactacctctactgtttcagctcattattgactacttagctgagttcaattccacaccagctgtctttacaatgataactgagcagttgaagaagacctactttaacatcctcatcaagcccgagactttggccaaagatgtacggcttttaatcttggaatatgcccgttggtctatgattgacaagtaccaggctttgatggacggcctttcccttgagtctctgctgagcttcgtcaaagaattcaaatcccagctctttgtggagggcctggtacaagggaatgtcacaagcacagaatctatggatttcctgaaatatgttgttgacaaactaaacttcaagcctctggagcaggagatgcctgtgcagttccaggtggtagagctgcccagtggccaccatctatgcaaagtgaaagctctgaacaagggtgatgccaactctgaagtcactgtgtactaccagtcaggtaccaggagtctaagagaatatacgcttatggagctgcttgtgatgcacatggaagaaccttgttttgacttccttcgaaccaagcagacccttgggtaccatgtctaccctacctgtaggaacacatccgggattctaggattttctgtcactgtggggactcaggcaaccaaatacaattctgaagttgttgataagaagatagaagagtttctttctagctttgaggagaagattgagaacctcactgaagaggcattcaacacccaggtcacagctctcatcaagctgaaggagtgtgaggatacccaccttggggaggaggtggataggaactggaatgaagtggttacacagcagtacctctttgaccgccttgcccacgagattgaagcactgaagtcattctcaaaatcagacctggtcaactggttcaaggcccatagagggccaggaagtaaaatgctcagcgttcatgttgttggatatgggaagtatgaactggaagaggatggtaccccttctagtgaggattcaaattcttcttgtgaagtgatgcagctgacctacctgccaacctctcctctgctggcagattgtatcatccccattactgatatcagggctttcacaacaacactcaaccttctcccctaccataaaatagtcaaataaataaactgcagtcacgttggcctgaagcaatgtgtattttaaaaaaaaaaaa

SEQ ID NO: 58 - DNA, 3970 bp, Homo sapiens
  CDS (259)..(3918)
cctttcctgttctgattggttgcttacgtgagcgtgactactttcttgcctcatgattggctgaaatcagtagcgtcatcggcggccgggagggcggagggacgagggaagtcggcgagagggagactgggttgggggaggggttcaggcctgttccccgcggctgcggcagcaccagggccggccgccaccgcctctagaacgcggaggaggtgggtcctgggaagcgggatgtccatcgctccagcttggtggtgaatgctgaggagagtcactgttgctgcagtctgtgccacccggaggaagttgtgtgaggccgggcgggagctcgcggcgctctggggaatcgaaacgcggggtcggtgcgaagactctgctgctgccagaccctttcctattctggccatgcctggaaggaacaaggcgaagtctacctgcagctgccctgacctgcagcccaatggacaggatctgggcgagaacagccgggttgcccgtctaggagcggatgaatctgaggaagagggacggagggggtctctcagtaatgctggggaccctgagatcgtcaagtctcccagcgaccccaagcaataccgatacatcaaattacagaatggcttgcaggcacttctgatttcagacctaagtaatatggaaggtaaaacaggaaatacaacagatgatgaagaagaagaggaggtggaggaagaagaagaagatgatgatgaagattctggagctgaaatagaagatgacgatgaagagggttttgatgatgaagatgagtttgatgatgaacatgatgatgatcttgatactgaggataatgaattggaagaattagaagagagagcagaagctagaaaaaaaactactgaaaaacagcaattgcagagcctgtttttgctgtggtcaaagctgactgatagactgtggtttaagtcaacttattcaaaaatgtcttcaaccctgctggtcgagacaagaaatctttatggggtagttggagctgaaagcaggtctgcacctgttcagcatttggcaggatggcaagcggaggagcagcagggtgaaactgacacagttctgtctgcagcggctctttgtgttggagttgggagtttcgctgatccagatgacctgccggggctggcacactttttggagcacatggtattcatgggtagtttgaaatatccagatgagaatggatttgatgccttcctgaagaagcatgggggtagtgataatgcctcaactgattgtgaacgcactgtctttcagtttgatgtccagaggaagtacttcaaggaagctcttgatagatgggcgcagttcttcatccacccactaatgatcagagatgcaattgaccgtgaagttgaagctgttgatagtgaatatcaacttgcaaggccttctgatgcaaacagaaaggaaatgttgtttggaagccttgctagacctggacatcctatgggaaaatttttttggggaaatgctgagacgctcaagcatgagccaagaaagaataatattgatacacatgctagattgagagaattctggatgcgttactactcttctcattacatgactttagtggttcaatccaaagaaacactggatactttggaaaagtgggtgactgaaatcttctctcagataccaaacaatgggttacccagaccaaactttggccatttaacggatccatttgacacaccagcatttaacaaactttatagagttgttccaatcagaaaaattcatgctctgaccatcacatgggcacttcctcctcaacagcaacattacagggtgaagccacttcattatatatcctggctggttggacatgaaggcaaaggcagcattctttctttccttaggaaaaaatgctgggctcttgcactgtttggtggaaatggtgagacaggatttgagcaaaattctacttattcagtgttcagcatttctattacattgactgatgagggttatgaacatttttatgaggttgcttacactgtctttcagtatttaaaaatgctgcagaagctaggcccagaaaaaagaatttttgaagagattcggaaaattgaggataatgaatttcattaccaagaacagacagatccagttgagtatgtggaaaacatgtgtgagaacatgcagctgtacccattgcaggacattctcactggagatcagcttctttttgaatacaagccagaagtcattggtgaagccttgaatcagctagttcctcaaaaagcaaatcttgttttactgtctggtgctaatgagggaaaatgtgacctcaaggagaaatggtttggaactcaatatagtatagaagatattgaaaactcttgggctgaactgtggaatagtaatttcgaattaaatccagatcttcatcttccagctgaaaacaagtacatagccacggactttacgttgaaggctttcgattgcccggaaacagaatacccagttaaaattgtgaatactccacaaggttgcctgtggtataagaaagacaacaaattcaaaatccccaaagcatatatacgtttccatctaatttcaccgttgatacagaaatctgcagcaaatgtggtcctctttgatatctttgtcaatatccttacgcataaccttgcggaaccagcttatgaagcagatgtggcacagctggagtataaactggtagctggagaacatggtttaattattcgagtgaaaggatttaaccacaaactacctctactgtttcagctcattattgactacttagctgagttcaattccacaccagctgtctttacaatgataactgagcagttgaagaagacctactttaacatcctcatcaagcccgagactttggccaaagatgtacggcttttaatcttggaatatgcccgttggtctatgattgacaagtaccaggctttgatggacggcctttcccttgagtctctgctgagcttcgtcaaagaattcaaatcccagctctttgtggagggcctggtacaagggaatgtcacaagcacagaatctatggatttcctgaaatatgttgttgacaaactaaacttcaagcctctggagcaggagatgcctgtgcagttccaggtggtagagctgcccagtggccaccatctatgcaaagtgaaagctctgaacaagggtgatgccaactctgaagtcactgtgtactaccagtcaggtaccaggagtctaagagaatatacgcttatggagctgcttgtgatgcacatggaagaaccttgttttgacttccttcgaaccaagcagacccttgggtaccatgtctaccctacctgtaggaacacatccgggattctaggattttctgtcactgtggggactcaggcaaccaaatacaattctgaagttgttgataagaagatagaagagtttctttctagctttgaggagaagattgagaacctcactgaagaggcattcaacacccaggtcacagctctcatcaagctgaaggagtgtgaggatacccaccttggggaggaggtggataggaactggaatgaagtggttacacagcagtacctctttgaccgccttgcccacgagattgaagcactgaagtcattctcaaaatcagacctggtcaactggttcaaggcccatagagggccaggaagtaaaatgctcagcgttcatgttgttggatatgggaagtatgaactggaagaggatggtaccccttctagtgaggattcaaattcttcttgtgaagtgatgcagctgacctacctgccaacctctcctctgctggcagattgtatcatccccattactgatatcagggctttcacaacaacactcaaccttctcccctaccataaaatagtcaaataaataaactgcagtcacgttggcctgaagcaatgtgtattttaaaaaaaaaaaa

SEQ ID NO: 59 - DNA, 1261 bp, Homo sapiens
  CDS (158)..(676)
tgtgcgttaattgaacgctgttgtaccgctccggaattcccgggtcgacccacgcgtccgcctggagtccagacccgacggccggcccagttccacgcacccagcgagcccaagcgccttctccgcaccagggaagccccacccaccagaagccaagatgtccagcaagcgggccaaagccaagaccaccaagaagcggccacagcgggccacatccaatgtcttcgcaatgtttgaccagtcccagatccaggagtttaaggaggctttcaacatgattgaccagaaccgtgatggcttcattgacaaggaggacctgcacgacatgctggcctcgctggggaagaaccccacagacgaatacctggagggcatgatgagcgaggccccggggcccatcaacttcaccatgttcctcaccatgtttggggagaagctgaacggcacggaccccgaggatgtgattcgcaacgcctttgcctgcttcgacgaggaagcctcaggtttcatccatgaggaccacctccgggagctgctcaccaccatgggtgaccgcttcacagatgaggaagtggacgagatgtaccgggaggcacccattgataagaaaggcaacttcaactacgtggagttcacccgcatcctcaaacatggcgccaaggataaagacgactaggccaccccagccccctgacaccccagcccccgccagtcacccctccccgcacacacccgtccataccagctccctgcccatgaccctcgctcagggatccccctttgaggggttagggtcccagttcccagtggaagaaacaggccaggagaagtgcgtgccgagctgaggcagatgttcccacagtgaccccagagccctgggctatagtctctgacccctccaaggaaagaccaccttctggggacatgggctggagggcaggacctagaggcaccaagggaaggccccattccggggctgttccccgaggaggaagggaaggggctctgtgtgccccccaggaggaagaggccctgagtcctgggatcagacaccccttcacgtgtatccccacacaaatgcaagctcaccaaggtcccctctcagtccccttccctacaccctgaccggccactgccgcacacccacccagagcacgccacccgccatgggagtgtgctcaggagtcgcgggcagcgtggacatctgtcccagagggggcagaatctccaatagaggactgagcactgaaaaaaaaaaaaa

SEQ ID NO: 60 - DNA, 1524 bp, Homo sapiens
  CDS (1034)..(1408)
aaaccgctccggaatttccgggtcgacccacgcgtccgtcctgccccaccaccgctgctcctcagcaggcgcctcaccagcctccacaccccttgcgcccgcagaaacgcgcctggccctgagctgtcaccaccgacactctccaggctccggacacgatgcaggccatcaagtgtgtggtggtgggagatggggccgtgggcaagacctgccttctcatcagctacaccaccaacgcctttcccggagagtacatccccaccgtgtttgacaactattcagccaatgtgatggtggacagcaagccagtgaacctggggctgtgggacactgctgggcaggaggactacgaccgtctccggccgctctcctatccacagacggacgtcttcctcatctgcttctccctcgtcagcccagcctcttatgagaacgtccgcgccaagtggttcccagaagtgcggcaccactgccccagcacacccatcatcctggtgggcaccaagctggacctgcgggacgacaaggacaccatcgagaaactgaaggagaagaagctggctcccatcacctacccgcagggcctggcactggccaaggagattgactcggtgaaatacctggagtgctcagctctcacccagagaggcctgaaaaccgtgttcgacgaggccatccgggccgtgctgtgccctcagcccacgcggcagcagaagcgcgcctgcagcctcctctaggggttgcaccccagcgctcccacctagatgggtctgatcctccaggatccccacccaaagcctgatggcaccccggctggccatgctgtcccctccctgtggcgtttcttagcagatggctgcagagcttcgttgatggtcttttctgtactggaggcctcctgaggccaggaacgtgcaaatttgcaggtgctgcatcccaagcccctcatgctcctgccttcctgagggccagaggggagccccaggacccattaagccacccccgtgttcctgccgtcagtgccaactgccgcatgtggaagcatctacccgttcactccagtcccaccccacgcctgactcccctctggaaactgcaggccagatggttgctgccacaacttgtgtaccttcagggatggggctcttactccctcctgaggccagctgctctaatatcgatggtcctgcttgccagagagttcctctacccagcaaaaatgagtgtctcagaagtgtgctcctctggcctcagttctcctcttttggaacaacataaaacaaatttaattttctacgcctctggggatatctgctcagccaatggaaaatctgggttcaaccagcccctgccatttcttaagactttctgctccactcacaggatcctgagctgcacttacctgtgagagtcttcaaacttttaaaccttgccagtcaggacttttgctattgcaaatagaaaacccaactcaacctgcttaagcagaaaataaatttattgattcaaaaaaaaaaaaaaagg

SEQ ID NO: 61 - DNA, 1072 bp, Homo sapiens
  CDS (1)..(645)
atggtgtccaagtcactttggaggaaatgggagcagaagctggattgtgaattgaagaaacaaatacacaattatccagagtgcagaattcttcaggatgaaatctgtaggacaatgagctggttggagcagctcatcagtgactgtcacactctgactacggagctggccagccccacgcttcttaccatggaaatggaccttcgtcgcctgccacaacctgctcttgcttgtgaaaggcagagggctgcctataaagaggagagctggtttcagacttcagaaggacacgggcagcagacagtggtcagtcctttcttggctctgctgacactcgagcccacattccgtcacctgctcagaatcatgcaggtctccactgctgcccttgctgtcctcctctgcaccatggctctctgcaaccagttctctgcatcacttgctgctgacacgccgaccgcctgctgcttcagctacacctcccggcagattccacagaatttcatagctgactactttgagacgagcagccagtgctccaagcccggtgtcatcttcctaaccaagcgaagccggcaggtctgtgctgaccccagtgaggagtgggtccagaaatatgtcagcgacctggagctgagtgcctgaggggtccagaagcttcgaggcccagcgacctcggtgggcccagtggggaggagcaggagcctgagccttgggaacatgcgtgtgacctccacagctacctcttctatggactggttgttgccaaacagccacactgtgggactcttcttaacttaaattttaatttatttatactatttagtttttgtaatttattttcgatttcacagtgtgtttgtgattgtttgctctgagagttcccctgtcccctcccccttccctcacaccgcgtctggtgacaaccgagtggctgtcatcagcctgtgtaggcagtcatggcaccaaagccaccagactgacaaatgtgtatcggatgcttttgttcagggctgtgatcggcctggggaaataataaagatgctcttttaaaaggtaaaaaaaaaaaaaa

SEQ ID NO: 62 - DNA, 655 bp, Homo sapiens
  CDS (232)..(510)
atttggccctcgaggcaagaattcggaacgaggcggaaaggtgataccatctgacagtcattttctcacgttggtcttctaaagtcacctatttcttgtgtgtgcacatcacaccatttcctgtttctttataacccgacaagggtaggagtgcctgtttcccctgctgggcacaccagacaatcgtaatcacaaaacagacactgagccagggacccaaagggtgtgatcatgagagttaccgggacagcagtaggcatgacagtcaccaggaaggacaagggtgctctgttgttagtggccacacaccaatttgacaaggagtgttgcgaaatttttatttatttatttatttattttgagatggagtttcactcttgttgcccaggctggagtgcggtggtacaatctcggctcactgcaacctccacctcccaggttcaagcgattctcctgcctcagcctcccaagtacctgggactacaggtgcgtgccaccacacccagctaaattttgtgtttttagtagagatggggtttcaccatgttggccaggatggtcttgaacccctgacctcatgatctgcctgcctcggcctcccaaagtgctgggattacaggcatgagccaccacgcccagccaaaatattttttta

SEQ ID NO: 63 - DNA, 2191 bp, Homo sapiens
  CDS (422)..(1957)
cccacgcgtccgcagagagcaagagagaggaactggggtttgcgaaccttgtggctttgtctgtttcctgtttcagcaaggctgctgtgcaaaaagaaagacggtaccaagaagggacgtgttaatggggcccagacctatggattgaaagcgtgtgctttacccatctgctgtcttgctccatcttgagaccatagccaagatctgtccaggactggaatgctttcccgagtggcttgagttggagcctgggactacgagcagccttattgaggtacaattcatgtgcttgtgggtttggatggcacaatctgtgtctgggctaaggaaagcagacttggcaccaacattatacctgacagatccatgcatctattgcaggaacttgtaagccaagcgcaacaggtgcttggaggtcatcatgatcagcccagaccccaggccctcccctggcttggcccggggggctgagagctatgaggccaagtgtgagcgcaggcaagagatccgggaaagccgccgctgccgtcccaatgtgaccacttgccgccaggtggggaagacgctgaggatccagcagagagagcagctccagagagctcgactgcagcagttcttcaggaggaggaacctggagctagaggagaagggcaaagcgcagcatccccaggccagggagcaagggccctccaggcggccaggacaggtgacaggcaccagctctgaagtctttccagcccagcatcctcctccctcaggcatctgcagggatctgtctgaccacctctcctcacaggctgggggccttcctccacaggacactcccatcaagaagccacccaaacaccaccgtggtactcagacaaaggcagaaggaccaacaattaagaacgatgccagtcagcaaaccaattacggagttgcagttctggataaggaaatcatccagctttctgattacctcaaagaggccctacaaagggagctggtcctaaaacagaaaatggtgattctccaagacctactgtccactctgattcaggcctctgacagctcttggaagggacagcttaatgaagacaaactgaaggggaaactgagatccttagaaaaccagctatacacctgtacccagaaatactccccttggggaatgaaaaaagtactactggagatggaagaccagaaaaacagctatgagcagaaggccaaggagtcactgcagaaagtgctggaggagaaaatgaatgcagagcagcaactacagagcacacagcgatccctggccctggcagagcagaagtgtgaagagtggaggagccagtatgaggctctgaaggaggactggaggacccttgggacccagcacagggagctggagagccaactccacgtgcttcagtccaaactgcagggagcagatagcagggacttacagatgaaccaggccctgcgatttttggaaaatgagcaccagcaactgcaggccaagattgaatgcctgcaaggggacagagacctgtgcagcttggatacccaggacctacaagatcaactaaaaaggtcagaggcagagaaactcaccctggtgaccagagtacagcagttgcagggtttgcttcaaaatcaatccttacagcttcaagaacaggagaaactcttaacaaagaaagatcaggctttgcccgtgtggagtccaaagtccttccctaacgaagtggagcctgagggtacagggaaggagaaagactgggatctcagagaccagctgcaaaagaagactttgcagctccaggccaaggaaaaggagtgcagagaactgcattcagaattagacaacctcagtgacgagtatctctcctgcctgcgtaagctgcagcactgtcgagaagagctgaaccagagccagcagctgcctcccagaaggccaatgtgggcaaaggcctcccagtgctaatggtggtgattgctccagcactggcagtgttcctggccaataaaaacaacctgatgatttgaataatttgtgacaactgccttgggtgaaaatcaaaagcaagcaactcagcgaaaaactcaaaaggtttgggtacattacagcttgggttttccaactgacttaggatttctgactttttattaatttcttaacctactgtaaataaacttcacctgaccagattgttgcaat

SEQ ID NO: 64 - DNA, 1469 bp, Homo sapiens
  CDS (348)..(1433)
gcgacctatttaatacgaccactatagggaatttgtccctcgagcgaagaattcggcacgagtggtatttttcaaataaaatgattaattctactaccaaataaatcttaatttctagtctacttctagtttgcaagaggagctttaaatgtatttgtttacttaacatttaaaaatccatttctccttaaaatgaaacactttttttaaggtaggtaatattttaatttgactagaagttagtttttctttcttagtttaagctactttgttagtcttacaattttaataagtatagttattacctagtgacatttctgtttgtttttttaaggttaacattcaagatggtacatgctgaagccttttctcgtcctttgagtcggaatgaagttgttggtttaattttccgtttgacaatatttggtgcagtgacatactttactatcaaatggatggtagatgcaattgatccaaccagaaagcaaaaagtagaagctcagaaacaggcagaaaaactaatgaagcaaattggagtgaaaaatgtgaagctctcagaatatgaaatgagtattgctgctcatcttgtagaccctcttaatatgcatgttacttggagtgatatagcaggtttagatgatgtcattacggatctgaaagacacagtcatcttacctatcaaaaagaaacatttgtttgagaattccaggcttctgcagcctccaaaaggtgttcttctctatgggcctccaggctgtggtaaaacgttgattgccaaggccacagccaaagaagcaggctgtcgatttattaaccttcagccttcgacactgaccgataagtggtatggagaatctcagaaattggctgctgctgtcttctcccttgccataaagctacaaccatccatcatctttatagatgaaatagactcctttctacgaaaccgttcaagttctgaccatgaagctacagccatgatgaaagctcagtttatgagtctctgggatggattggatactgatcacagctgccaggtcatagtaatgggagctaccaatcgtcctcaggaccttgactcggctataatgagaagaatgcctacaagatttcatatcaaccagcctgctttaaaacagagagaagcaatcctgaaactcatcttgaaaaatgaaaatgtggataggcatgtagacctgctagaagttgcccaggaaactgatgggttttcaggaagtgacctaaaagagatgtgtcgagatgctgccctcctctgtgttagagaatatgttaattctacatcagaagaaagccatgacgaagatgaaattcggcctgttcaacagcaggacctgcatcgggcaattgaaaagatgaagaaatcaaaggatgcagcatttcagaatgttttaacacatgtttgtttagattaagagtaaagatcatttgtacagttcaaaaaaaaaaaa

SEQ ID NO: 65 - DNA, 1206 bp, Homo sapiens
  CDS (95)..(979)
gcacgagcacaggtgacgctcctcccgcctgcctagcagagctccaggcgcacatccgcagtcagccacctcgcgcgcgcctccaggagcaaggatggagaggctgactctgaccaggacaattgggggccctctccttacagctacactcctagggaagaccaccatcaatgattaccaggtgatcaggatgcccttctgtcatctgtctacctacagcctggtttgggtcatggcagcagtggtgctgtgcacagcacaagtgcaagtggtgacccaggatgaaagagagcagctgtacacacctgcttccttaaaatgctctctgcaaaatgcccaggaagccctcattgtgacatggcagaaaaagaaagctgtaagcccagaaaacatggtcaccttcagcgagaaccatggggtggtgatccagcctgcctataaggacaagataaacattacccagctgggactccaaaactcaaccatcaccttctggaatatcaccctggaggatgaagggtgttacatgtgtctcttcaatacctttggttttgggaagatctcaggaacggcctgcctcaccgtctatgtacagcccatagtatcccttcactacaaattctctgaagaccacctaaatatcacttgctctgccactgcccgcccagcccccatggtcttctggaaggtccctcggtcagggattgaaaatagtacagtgactctgtctcacccaaatgggaccacatctgttaccagcatcctccatatcaaagaccctaagaatcaggtggggaaggaggtgatctgccaggtgctgcacctggggactgtgaccgactttaagcaaaccgtcaacaaaggctattggttttcagttccgctattgctaagcattgtttccctggtaattcttctcgtcctaatctcaatcttactgtactggaaacgtcaccggaatcaggaccgagagccctaaataagtcacacagcaccctgaaagtgattccctggtctacttgaatttgacacaagagaaaagcaggaggaaaaggggccattctccaaaggacctgaaagagcaaaagaggtgggagcgaaagccttaaggatcccacgactttttactgccatctgagctactcagtgtttgaatcccaagaggaagcagtttacctctcaagtctgttgtaggacttgattttg

SEQ ID NO: 66 - DNA, 1273 bp, Homo sapiens
  CDS (251)..(1192)
tccgggtcgacccacgcgtccggagcggggcgtgggacgtgctgcggcgtcctagctggcttacagggcggcggcggggtgtgtgtcctctgttaagagtgctactcgcccggggttgatctgtgcatgccactcctgggtcagacggtgaggtcggcgtctgcgaggacgcggcggtggagtagaagggcagccggagacaggcccggcgccccttccgaggctagacggccccagcttcgcggggatcatggcattgctggtggaccgagtgcggggccactggcgaatcgccgccgggctcctgttcaacctgctggtgtccatctgcattgtgttcctcaacaaatggatttatgtgtaccacggcttccccaacatgagcctgaccctggtgcacttcgtggtcacctggctgggcttgtatatctgccagaagctggacatctttgcccccaaaagtctgccgccctccaggctcctcctcctggccctcagcttctgtggctttgtggtcttcactaacctttctctgcagaacaacaccataggcacctatcagctggccaaggccatgaccacgccggtgatcatagccatccagaccttctgctaccagaaaaccttctccaccagaatccagctcacgctgattcctataactttaggtgtaatcctaaattcttattacgatgtgaagtttaatttccttggaatggtgtttgctgctcttggtgttttagttacatccctttatcaagtgtgggtaggagccaaacagcatgaattacaagtgaactcaatgcagctgctgtactaccaggctccgatgtcatctgccatgttgctggttgctgtgcccttctttgagccagtgtttggagaaggaggaatatttggtccctggtcagtttctgctttgcttatggtgctgctatctggagtaatagctttcatggtgaacttatcaatttattggatcattgggaacacttcacctgtcacctataacatgttcggacacttcaagttctgcattactttattcggaggatatgttttatttaaggatccactgtccattaatcaggcccttggcattttatgtacattatttggcattctcgcctatacccactttaagctcagtgaacaggaaggaagtaggagtaaactggcacaacgtccttaattgggtttttgtggagaaaagaatgttgtcccaagaagataaaaaatattgttaagtgtgcaagttattaaaaaaaaaaaa

SEQ ID NO: 67 - DNA, 715 bp, Homo sapiens
  CDS (97)..(438)
ccactttgtacaagaaagctgggtacgcgtaagcttgggcccctcgagggatactctagagcggccgccctttttttttttttttttttcacatctatggaacactttattttaaattcttttaataatattattatttttcagctgagtctgggtctcactctgtcgcccaggctggaatgcagtggcatgatcacagctcactgcggcctccaactcctgggctcaagtgattctcctgccccagcctcccgagtagctgggactacaggcttgcgccaccatgcccggcttatagggcactttagatggaaacaaatgactggatctttaactcctacctttctctcctctcttcctgtaatgttgttactgaaggcaggaagggagactccttggctaaagagcagagcaagagcctcaaagtggtctttgtgagccaccctggactactggttcagtagagggttgagtcaagcaatatttgaggacgggatataaacagtatttcttaaagttgtcaccaatttttcccccgatgaggccattccagacccaaattagtcataacagagccaggacaataatcacatctcctgattctgagcctgaatgcttcccacaggactgcgtcgctcccactgctctgaggtccattgtgggggagagttgccactgggattccacctcaaggcgtggggaccaagacggattc

SEQ ID NO: 68 - DNA, 1160 bp, Homo sapiens
  CDS (362)..(772)
gcacgaggggccctgaggggcgccgagatgtgggagctgctggccgcggcgtgggcagttcaggggctgggcggctgagggtgcaaatagctatgggcaacttggcctcggccataaggaagatgtgctgttgccccagcaactgaatgacttctgtaaacccaggagtgtcaggaggatcacaggaggagggggccactctgcagttgtcacagatggaggagacctctttgtttgtggcctgaacaaagatgggcaactggggcttggtcacacagaggatatcccatattttaccccctgcaaatccctctttggctgtcccatccaacaggtggcctgtggctgggattttacgattatgctcacagaaaatggtcaagttctatcatgtggatccaactcctttggccagttaggagttcctcatggacctcgaagatgtgtggttccccaggccattgagctccataaagagaaggttgtttgtattgctgctggactgaggcatgcagtagctgctacaggtctagagaattctaaagcaatgtgtgttcttgctggctcagaccactcagcttcattaacagatgcaggagaggtgtatgtttggggaagcaacaagcatgggcaactggctaatgaggctgctttccttcctgtgccccagaaaatagaagcacattgtttccagaatgaaaaggtcactgccatctggagtggatggacacacctggttgctcagacaggtctcttgtggctcagagcataatttggcaataattggtggagtgtgttactcttggggctggaatgagcatggcatgtgcggagatggcactgaagccaacgtctgggccccaaagccggtgcaggctctgctgtcatcgtcaggactccttgtgggctgtggggctggccactccttggccctctgccagctgccagctcaccctgcattggtccaggaccccaaggtcacctacctttccccagatgccatcgaggacactgaatctcagaaagccatggacaaagagagaaactggaaggaaagacaatcagaaacttcaacccaaagccaatctgactggtccagaaatgggggactgtgatagagaatctttaataaagtggcttttcccaccaaaaaaaaaaaa

SEQ ID NO: 69 - DNA, 1274 bp, Homo sapiens
  CDS (362)..(886)
gcacgaggggccctgaggggcgccgagatgtgggagctgctggccgcggcgtgggcagttcaggggctgggcggctgagggtgcaaatagctatgggcaacttggcctcggccataaggaagatgtgctgttgccccagcaactgaatgacttctgtaaacccaggagtgtcaggaggatcacaggaggagggggccactctgcagttgtcacagatggaggagacctctttgtttgtggcctgaacaaagatgggcaactggggcttggtcacacagaggatatcccatattttaccccctgcaaatccctctttggctgtcccatccaacaggtggcctgtggctgggattttacgattatgctcacagaaaatggtcaagttctatcatgtggatccaactcctttggccagttaggagttcctcatggacctcgaagatgtgtggttccccaggccattgagctccataaagagaaggttgtttgtattgctgctggactgaggcatgcagtagctgctacagcgagtggcatcgtgttccagtgggggactggtttggcatcatgtggacgacggttgtgccctgggcagactcttccattgtttttcacagcaaaggaaccaagcagagtgacaggtctagagaattctaaagcaatgtgtgttcttgctggctcagaccactcagcttcattaacagatgcaggagaggtgtatgtttggggaagcaacaagcatgggcaactggctaatgaggctgctttccttcctgtgccccagaaaatagaagcacattgtttccagaatgaaaaggtcactgccatctggagtggatggacacacctggttgctcagacaggtctcttgtggctcagagcataatttggcaataattggtggagtgtgttactcttggggctggaatgagcatggcatgtgcggagatggcactgaagccaacgtctgggccccaaagccggtgcaggctctgctgtcatcgtcaggactccttgtgggctgtggggctggccactccttggccctctgccagctgccagctcaccctgcattggtccaggaccccaaggtcacctacctttccccagatgccatcgaggacactgaatctcagaaagccatggacaaagagagaaactggaaggaaagacaatcagaaacttcaacccaaagccaatctgactggtccagaaatgggggactgtgatagagaatctttaataaagtggcttttcccaccaaaaaaaaaaaa

SEQ ID NO: 70 - DNA, 672 bp, Homo sapiens
  CDS (201)..(308)
gcacgagcggacgtagctgtcgccacctcgcgccgggtccgccggcccacgggaccccccactgacgcccccggcagcggtccacatggacgtgcggggccctgaagccccggcggcgcgcgctgcgggacgcggcagaaaatctatttcaggaacttcaggaacattttcaagctctgacggcaacattaaacctcagaatggaagaaatgggaaatcgcattgaggacttacagaagaatgtcaatgacttaatggtgcaagctggcattgaaaattctattaaagaacaaatgctgaagacctaactgcagcatgtctgtatttggagatggggcctctacagaagtcattaaggttacatcggtcctgagggtggggccctcatccaacaggattcgtctttctgagaagagacgcaaggggctcgcctgctctccccccgtgcctgcaccagagaaggaggccatcggcaagccaaggagagccctccccagaaatcacacggaccagcaccttgatctgggacttccagaaaacagaactgtgaaaagacaagtttctgttgtttaaaccacccaatctgaagtattttgttatggcagtcctgggcagactaatacaatatgcaacacatttacaataaatatacaataaacttaaaaaaaaaaa

SEQ ID NO: 71 - DNA, 424 bp, Homo sapiens
  CDS (89)..(274)
atttggccctcgaggccaagaattcggcacgagcctgccctgacttctcatatcttgcctaggaactccaggcttgtcttggctccaaatggatcccaactgctcctgcaccacaggtggctcctgtgcctgcgccggctcctgcaagtgcaaagagtgcaaatgtacctcctgcaagaagtgctgctgctcttgctgccccgtgggctgtgccaagtgtgcccagggctgtgtctgcaaaggctcatcagagaagtgccgctgctgtgcctgatgttgggagagccctgctcccagacataaatagagcaaccagtactaacctggatttttttttttaactaccctgaccggtttgctacattcttttttctattcaatatgtgaaagacaataaaacacttttgacttgaaaaaaaaaaaa

SEQ ID NO: 72 - DNA, 2183 bp, Homo sapiens
  CDS (433)..(1443)
  misc_feature (1)...(2183): n = a,t,c or g
atgcgatatctctgtaacttctcaatttttctgtaaactctaactactctatattagtctttaaaaaatcgcttatcttacgaatgattttgaataagcgttttgggaatgttctagagatgaatctcctccccatgtcctacgctgggtgaggaagtgtcgggtacccgggcgacctgtcctcaggtgttctaggaacgcggccccatcccttgtcagcctctgtctctgtgtggtgagaaggcgcactggctcgtgcntgcgcgaaactcgcgcacacagaaaagaccaatcaaggacgggtcattcccgccccccgcgcgccttttgcgaccgcccactcgacaggttgacaacctagacagctcccccggacttgccttacttttccatctcctcccacccagctataccctcccactggcggcgcggatggcacgccggcggagccagcgagtctgcgcgagcggtccgagcatgctcaatagcgcgcgcggcgccccggagcttctccgcggaaccgcgaccaacgcggaggtctcggcggccgctgcgggagccacaggaagtgaagagcttccgccgggagaccgcggctgcaggaacggaggcggaaggggccctgcggcgacgacgtcgtcgacgggggtggccgtgggagctgagcacggagaagactccctctctcggaagccggatcccgagccgggcaggatggatcaccaccagccggggactgggcgctaccaggtgcttcttaatgaagaggataactcagaatcatcggctatagagcagccacctacttcaaacccagcaccgcagattgtgcaggctgcgtcttcagcaccagcacttgaaactgactcttcccctccaccatatagtagtattactgtggaagtacctacaacttcagatacagaagtttacggtgagttttatcccgtgccacctccctatagcgttgctacctctcttcctacatacgatgaagctgagaaggctaaagctgctgcaatggcagctgcagcagcagaaacatctcaaagaattcaggaggaagagtgtccaccaagagatgacttcagtgatgcagaccagctcagagtggggaatgatggcattttcatgctggcatttttcatggcatttattttcaactggcttggattttgtttatccttctgtatcaccaataccatagctggaaggtatggtgctatctgcggatttggcctttccttgatcaaatggatccttattgtcaggttttctgattattttactggatatttcaatggacagtattggctttggtggatatttcttgtacttggcctgctccttttcttcagaggatttgttaattatctaaaagtcagaaacatgtctgaaagtatggcagctgctcatagaacaaggtatttcttcttattgtagagactgcatcaacccgacattcctttcttataccaatgtgaaatttccagatcatctgtaaacctacaactttaatagaagactactaataacagaagacaaattagtgaagaaaagacggagtttcgaaattgaatggcagggtggtttttgcttacaagccatttctgttcattctttaagtatctatatttcatttgttttgcacatatgcatatgtgcccatttaagatatttgcatatacttgatagaaaccataaagttgtagcagttaagtccagtcacatttggttaatcagtgtttgatataattgaaagagttgagtggataaacagtcttccagcttgtaaatgccattgacttctgacctgacatttagtataataaaaatgaaattcttaaccatgtcaaatgatttagtttctggctcttagactcatctggcagttctacacatgaaacatcttttgttatataaggtgtattgaaacctgcagtgctgattattagaaaggatttgtcagatttttgaacatgatatttacattattatttaggaaaactcttcctgtaaataaccatgcataacttactttctgcaatgttttcttagaaattgtgtccagatagctgtcactaattgtaaattaagtgaactaaatatatatgtgtatatgtatacacatatatatacacacacacatatatatatttagaaacgtgagtgttaaagataga

SEQ ID NO: 73 - DNA, 1909 bp, Homo sapiens
  CDS (135)..(944)
ctcggcgtcccccttcagccccgcagcccccgcctccgcctccgggggccggcggaggctccgggaacgccccggggcccagccccatagcccaatcgccgactacctgctgctgcccctagccgagcgcgagcatgtgtcccgggcgctgtgcatccacactgggacgccgagtgcgctgcaaggtgtttcccattaaacactaccaggacaaaatcaggccttacatccagctgccatcgcacagcaacattactggcattgtggaagtgatccttggggaaaccaaggcctatgtcttctttgagaaggactttggggacatgcactcctatgtgcgaagccggaagaggctgcgggaagaggaagccgcccggctcttcaagcagattgtctccgccgtcgcccactgccaccagtcagccatcgtgctgggggacctgaagcttaggaagttcgtcttctccacggaggagagaacccagcttagactagaaagtctagaagacacacacataatgaagggggaagatgatgctttgtcagacaaacatggctgcccagcctacgtgagccctgagatcctcaacaccactgggacctactccggaaaggctgcggacgtttggagcctgggggtgatgctctacacccttctggttggacgataccccttccatgactcagaccccagtgcccttttctccaaaattcggcgtggacagttctgcattcctgagcacatttcccccaaagccaggtgcctcattcgcagcctcttgagacgggagccctccgagagactcactgcccccgagatcctactgcacccctggtttgagtccgtcttggaacccgggtacatcgactcagaaataggaacttcagaccagattgttccagagtaccaggaggacagtgacattagttccttcttctgctaatccccaaaacctcagaaacctcataattcttaacacctggcatttccatttctaaagatggacaggccctttggcgtggtaccaaccagataatgactgcatcaggatgaaagctgctgaactcggcatggcgcctcctcttctctgttgggatgagtgactttattgatttgagcagcatatgctgtgattggctgccctgcaaatttgtttcccttaaggaaccctcaccaactatctctgctggatttgggagttccgcatcttttgtggagggcagagtatggacatcttacacccggtggtcaagtgtgtaataaacttgagcattcgaatgggagaaaaagcaaatcgcacaatgacatattttgagtaataaccgtatttttcacagggtgacaaattgggccaataaatctgccatctttgaactcatctttggtggctagactgctacggcagcttctctgatgggaaagttccttttttggcttaacactcaccctttcttcacactcacatttaccaatgactctgctccgtttttggagcagactgttttaagttgctcaggagcctgatggaaccatgaaccgagactcttctctgtttcctgccaagacctcatctgcactaatgccttctccctgaccttgacacttccccctttagctataaaagcacttaccagccgaacgtggaacagtatcacaaaagattccatctcccaacgatttcagaactctgagctcagagagactccagattttaaaaaataatttgagtgcttggaaactattagctttttaagttccttccaaatatgttagtacctaccctttactttttccccaagaccatctcagggtggagcattctgtctaagagaagaaagataaggaggctcccacccacctctcccaagagcagacattaaacatctttgtgctttgaaaaaaaaaaaa

SEQ ID NO: 74 - DNA, 564 bp, Homo sapiens
  CDS (148)..(516)
ctgcggtaccggtccggaattcccgggtcgacccacgcgtccgcagatcccgaagcagcgctgggagcgtaagtgcgggcagagcactgcgccgtttgggaacgcaactttgaggagacagtgcggtggacttcagtgaagttccttatgacttcccctgaaattgcttccttatcatgggggcaaatgaaagtaaaaggctctaatacaacctataaggactgcaaagtatggccagggggtagtcggacttgggattggagagaaacaggaactgagcattctcctggtgtgcagcctgcagatgtgaaggaagttgttgagaagggtgtacagactcttgtgattggccgagggatgagtgaggccttgaaggtgccttcatcaactgtggagtacctcaagaaacatggcattgatgtgcgggtcctccagacagagcaggcagtgaaggagtataatgccttggttgcccaaggggtcagggtgggaggtgtcttccattccacctgctgatggagccttaagaggagaataaatcactaagtgcctaaaaaaaaaaaa

SEQ ID NO: 75 - DNA, 5944 bp, Homo sapiens
  CDS (344)..(4489)
ttgatttgaataccctgcggtaccggtccggaattcccgggtcgacccacgcgtccggactttgagcactctgagatatgcagatcgtgcaaaacaaattaaatgcaatgctgttatcaatgaggaccccaatgccaaactggttcgtgaattaaaggaggaggtgacacggctgaaggaccttcttcgtgctcagggcctgggagatattattgatattgatccattgatcgatgattactctggaagtggaagcaaatatctgaaagattttcagaacaataagcatagatacttgctagcctctgagaatcaacgccctggccatttttccacagcatccatggggtccctcacttcatccccatcttcctgctcactcagtagtcaggtgggcttgacgtctgtgaccagtattcaagagaggatcatgtctacacctggaggagaggaagctattgaacgtttaaaggaatcagagaagatcattgctgagttgaatgaaacttgggaagagaagcttcgtaaaacagaggccatcagaatggagagagaggctttgttggctgagatgggagttgccattcgggaagatggaggaaccctaggggttttctcacctaaaaagaccccacatcttgttaacctcaatgaagacccactaatgtctgagtgcctactttattacatcaaagatggaattacaagggttggccaagcagatgctgagcggcgccaggacatagtgctgagcggggctcacattaaagaagagcattgtatcttccggagtgagagaagcaacagcggggaagttatcgtgaccttagagccctgtgagcgctcagaaacctacgtaaatggcaagagggtgtcccagcctgttcagctgcgctcaggaaaccgtatcatcatgggtaaaaaccatgttttccgctttaaccacccggaacaagcacgagctgagcgagagaagactccttctgctgagaccccctctgagcctgtggactggacatttgcccagagggagcttctggaaaaacaaggaattgatatgaaacaagagatggagaaaaggctacaggaaatggagatcttatacaaaaaggagaaggaagaagcagatcttcttttggagcagcagagactggactatgagagtaaattgcaggccttgcagaagcaggttgaaacccgatctctggctgcagaaacaactgaagaggaggaagaagaggaagaagttccttggacacagcatgaatttgagttggcccaatgggccttccggaaatggaagtctcatcagtttacttcattacgggacttactctggggcaatgccgtgtacctaaaggaggccaatgccatcagtgtggaactgaaaaagaaggtgcagtttcagtttgttctgctgactgacacactgtactcccctttgcctcctgaattacttcccactgagatggaaaaaactcatgaggacaggcctttccctcgcacagtggtagcagtagaagtccaggatttgaagaatggagcaacacactattggtctttggagaaactcaagcagaggctggatttgatgcgagagatgtatgatagggcaggggagatggcctccagtgcccaagacgaaagcgaaaccactgtgactggcagcgatcccttctatgatcggttccactggttcaaacttgtggggagctcccccattttccacggctgtgtgaacgagcgccttgccgaccgcacaccctcccccactttttccacggccgattccgacatcactgagctggctgacgagcagcaagatgagatggaggattttgatgatgaggcattcgtggatgacgccggctctgacgcagggacggaggagggatcagatctcttcagtgacgggcatgacccgttttacgaccgatccccttggttcattttagtgggaagggcatttgtttacctgagcaatctgctgtatcccgtgcccctgatccacagggtggccatcgtcagtgagaaaggtgaagtgcggggatttctgcgtgtggctgtacaggccatcgcagcggatgaagaagctcctgattatggctctggaattcgacagtcaggaacagctaaaatatcttttgataatgaatactttaatcagagtgacttttcgtctgttgcaatgactcgttctggtctgtccttggaggagttgaggattgtggaaggacagggtcagagttctgaggtcatcactcctccagaagaaatcagtcgaattaatgacttggatttgaagtcaagcactttgctggatggtaagatggtaatggaagggttttctgaagagattggcaaccacctgaaactgggcagtgccttcactttccgagtaacagtgttgcaggccagtggaatcctcccagagtatgcagatatcttctgtcagttcaactttttgcatcgccatgatgaagcattctccacggagcccctcaaaaacaatggcagaggaagtcccctggccttttatcatgtgcagaatattgcagtggagatcactgaatcatttgtggattacatcaaaaccaagcctattgtatttgaagtctttgggcattatcagcagcacccacttcatctgcaaggacaggagcttaacagtccgcctcagccgtgccgccgattcttccctccacccatgccactgtccaagccagttccagccaccaagttaaacacgatgagcaaaaccagccttggccagagcatgagcaagtatgacctcctggtttggtttgagatcagtgaactggagcctacaggagagtatatcccagctgtggttgaccacacagcaggcttgccttgccaggggacatttttgcttcatcagggcatccagcgaaggatcacagtgaccattatccatgagaaggggagcgagctccattggaaagatgttcgtgaactggtggtaggtcgtattcggaataagcctgaggtggatgaagctgcagttgatgccatcctctccctaaatattatttctgccaagtacctgaagtcttcccacaactctagcaggaccttctaccgctttgaggctgtgtgggatagctctctgcataactcccttcttctgaaccgagtgacaccctatggagaaaagatctacatgaccttgtcggcctacctagagctggatcattgcatccagccggctgtcatcaccaaggatgtgtgcatggtcttctactcccgagatgccaagatctcaccaccacgctctctgcgtagcctctttggcagcggctactcaaagtcaccagattcgaatcgagtcactggcatttacgaactcagcttatgcaaaatgtcagacacaggtagtccaggtatgcagagaaggagaagaaaaatcttagatacgtcagtggcatatgtgcggggagaagagaacttagcaggctggcggccccgtggagacagcctcatccttgagcaccagtgggagctggagaagctggagctcctacatgaggtggaaaaaacccgccactttttgctgctgcgtgagagacttggtgacagcatccccaaatccctgagcgactcgttatcccccagcctcagcagtgggaccctcagcacctccaccagtatctcctctcagatctcaaccactacctttgaaagcgccatcacacctagcgagagcagtggctatgattcaggagacatcgaaagcctggtggaccgagagaaagagctggctaccaagtgcctgcaacttctcacccacactttcaacagagaattcagccaggtgcacggcagcgtcagtgactgtaagttgtctgatatctctccaattggacgggatccctctgagtccagtttcagcagtgccaccctcactccctcctccacctgtccctctctggtagactctaggagcaactctctggatcagaagaccccagaagccaattcccgggcctctagtccctgcccagaatttgaacagtttcagattgtcccagctgtggaaacaccatatttggcccgagcaggaaaaaacgaatttctcaatcttgttccagatattgaagaaattagaccaagctcagtggtctctaagaaaggataccttcatttcaaggagcctctttacagtaactgggctaaacattttgttgtcgtccgtcggccttatgtcttcatctataacagtgacaaagaccctgtggagcgtggaatcattaacctgtccacagcacaggtggagtacagtgaggaccagcaggccatggtgaagacaccaaacacctttgctgtctgcacaaagcaccgtggggtccttttgcaggccctcaatgacaaagacatgaacgactggttgtatgccttcaacccacttctagctggcacaatacggtcaaagctttcccgcagatgcccgagccagtcgaaatactaagtgactctgccgagtgccctcactcgccttcgagagataaagaaagcgttacctctcatttctctttgtgattcttgacggtgactcttgtatgtaatcctgtggcttaactacttctccctccttgtccagcacttttctagctctcccgttccccatctccattgctctgtactcttttcttttttcttgtgctgagaatctcgttagtagcatgtggcctaacaaaaggaaaaaatgtttttaaacacacacacacacttgcacccaccacacacacacacacacacacacacacaaaaactctgaggggatctggtgaatctccaaattattgtgggtgtactttggcttccttttgtatgataggtccccatcatgaccacctctgatgtctgtgctgctgtcaccaggcacctttgtttttcaagacaacatactttttttttcttttctctgtttgtgatatcactttaatttttcttgggtggcttagagactaagggaggagacatctggcctttttagaacctgagaggaaaaaaagagtctttttttcccctctgtctctttttgccatggctaatccctgcatttccattcagggaaaaggtggtagtgagcatagaactgcaacagttatattctgagtcaaagttggggctttttacggcataattatggaatttttatttactggtagagaggagacgagaggctttttcagtgggcctgggacagtggctgctcttgactttgtgtgaagggaaatgccaaggatgcttctggtggacttcaggggaccccagggtttggccgtgggccgtgatggcagcaggcggtgggatgcttgtagctcctcacagcaggattcctgcccactgttttttctctgttgggagggaagctcttttctaggagtgtctcagttctgcttttggcattagtgatggtggtggtacagttggaattagtgccatgtcatacacaaatgttccacaaggcgggagtgtttcactttctggtgataaacttgatggtcattgttatgattaagataatgccgggcaggccgggcacagtggctcacgcctgtaatccaagcacttggggaggccgaggcgggcagatcacgagatcaggagttcaagaccagcctggccaatatgatgaaaccccgtctctactaaaaatacaaaattagtcgggtatggtggcacatgcctgtaattccagctgcttgggagcctgaggcaggagaactgcttgaacccaggaggcagaggttgcagtgagccaagatcgcgctattgcactccagcctgggtgacagagcaagactctgcctcagaaaagcaagaagtaataataatgctgggtagtgaccttgtgattgttacagctccctttgatcaaagaaatatagctttcaggcataaaccttggaagtctcct

SEQ ID NO: 76 - DNA, 1142 bp, Homo sapiens
  CDS (70)..(732)
actagtccagtgtggtggaattctgggggcgctcgtcgctgcagccggcggctagcgggcgtccgcgccatggagcgctacgcgggcgccttggaggaggtggcggacggtgcccggcagcaggagcgacactaccagctgctgtcggcgttacagagcctggtgaaggagttgcccagctcattccagcagcgcttgtcctacaccacgctgagcgacctggccctggcgcttctcgacggcaccgtgttcgaaatcgtgcaggggctactggagatccagcacctcaccgaaaagagcctgtacaaccagcgcctgcgcctacagaacgagcatcgagtgctcaggcaggcgctgcggcagaagcaccaggaagcccagcaggcctgccggccccataacctgcctgtgcttcaggcggctcagcagcgagaactagaggcggtggagcaccggatccgtgaggagcagcgggcgatggaccagaagatcgtcctggagctggaccggaaggtggctgaccagcagagcacactggagaaggcgggggtggctggcttctacgtgaccaccaacccacaggagctgatgctgcagatgaacctgctggaactcatccggaagctgcagcagaggggctgctgggcagggaaggcagccctggggctaggaggtccctggcagttgcctgctgcccagtgtgaccagaaaggcagccctgtcccaccatagccacaggcagcagaagtctgggcagagttcatcttcttgacctttggccactgccttcccagctgcccgcagggggttccccctgctgaggagagaccaggtggaccccagctgcctgtcacccttcatctgggacttgctgtcaaaccctaggatagtctcataaaggggaggctgggccagcctgctgctgtctgcttcagggccaggcagagagtgaggctgggggttctcacaccttactccaccgggcacatcccaacctgcactggggcccactcgagtgcttgttctggtctcagccgctcccttggcagctgcagcccccatgcagaagaggctcccaggcccaagctctgtgtgacccagagaaataaagatgcctcagtgtggcccgcaaaaaaaaaaaa

SEQ ID NO: 77 - DNA, 1601 bp, Homo sapiens
  CDS (57)..(1046)
ggcacgaggtttccggcgacggcgcgggggcagctgggaatccggaatgctgcccgatggccctgggtcctcgctgtggggcaatccgggcttgcagacgagttttagaaagagcgttttcgctacgtaaagcacattcgataaaggatatggaaaatactttgcagctggtgagaaatatcatacctcctctgtcttccacaaagcacaaagggcaagatggaagaataggcgtagttggaggctgtcaggagtacactggagccccatattttgcagcaatctcagctctcaaagtgggcgcagacttgtcccacgtgttctgtgccagtgcggccgcacctgtgattaaggcctacagcccggagctgatcgtccacccagttcttgacagccccaatgctgttcatgaggtggagaagtggctgccccggctgcatgctcttgtcgtaggacctggcttgggtagagatgatgcgcttctcagaaatgtccagggcattttggaagtgtcaaaggccagggacatccctgttgtcatcgacgcggatggcctgtggctggtcgctcagcagccggccctcatccatggctaccggaaggctgtgctcactcccaaccacgtggagttcagcagactgtatgacgctgtgctcagaggccctatggacagcgatgacagccatggatctgtgctaagactcagccaagccctgggcaacgtgacggtggtccagaaaggagagcgcgacatcctctccaacggccagcaggtgcttgtgtgcagccaggaaggcagcagccgcaggtgtggagggcaaggggacctcctgtcgggctccctgggcgtcctggtacactgggcgctccttgctggaccacagaaaacaaatgggtccagccctctcctggtggccgcgtttggcgcctgctctctcaccaggcagtgcaaccaccaagccttccagaagcacggtcgctccaccaccacctccgacatgatcgccgaggtgggggccgccttcagcaagctctttgaaacctgagcccgcgcagaccagaagtaaacaggcaccttggacgggggagagcgtgtgtgtgatgggaaaatccggacccacgcgtgtgctgaaggcgtacggtgcttgccagattttcaacttgagcataaattggttgccattgagaatttaagaatctggaatattgcagcttttggttaaacttaatgcatggttggagatgttatggcgacactaaacaaagtattcctgaactttccttagctccttggtagtaactgggaagacagaaatgaagaaaatcacatgagaatgaagaattctttagcagctcaacagagtttctcggcctgctcccagatcggcgaagtttctacttgttactctctctgccggcgcccttcgttcctcctctgcttcccttccctagtctttcctccggcagggagctgggcaggggtccccgggtgtctccctgagtcccgactgcactgactgggtccatcagaggggtgcttcgttcttcagctcagttcttttaaagttgtgactacttggtggtatctggtctttggtttt

SEQ ID NO: 78 - DNA, 2034 bp, Homo sapiens
  CDS (302)..(1462)
cggtaccggtccggaattcccgggtcgacgatttcgtgcaggactcttggtggggtagcgagggggacggtcccacgactgctccgaagggccgggactcccagtgggggcgggacccccggagtgcccgcctgcggactcccaagcctggagcctggggagagggtgggcacctccgttcccgcacacccgtccatggtgtgtgcgccgagcgtccaggagccacggcggtgtcttccttgcgcgtcttttacacgtgtgggggtaggctgctcctcggggctgagccgtggccagggttatggagaggcccgcctctccccagatggcgtcgtcgagccctgactccccatgttcctgcgactgctttgtctccgtgcccccggcctcagccatcccggctgtgatctttgccaagaactcggaccgaccccgggacgaggtgcaggagggggtgtttgtccccgcaggcactcacactcctgggagccggctccagtgcacctacattgaagtggaacaggtgtcgaagacgcacgctgtgattctgagccgtccttcttggctatggggggctgagatgggcgccaacgagcatggtgtctgcattggcaacgaggctgtgtggacgaaggagccagttggggagggggaagccctgctgggcatggacctactcaggctggctttggaacggagcagctctgcccaggaggccttgcatgtgatcacagggttactggagcactatgggcaggggggcaactgcctggaggatgctgcgccattctcctaccatagcaccttcctgctggctgaccgcactgaggcgtgggtgctggagacagctgggaggctctgggctgcacagaggatccaggagggggcccgcaacatctccaaccagctgagcattggcacggacatctcggcccaacacccggagctgcggactcatgcccaggccaagggctggtgggatgggcagggtgcctttgactttgctcagatcttctccctgacccagcagcctgtgcgcatggaggctgccaaggcccgcttccaggcagggcgggagctgctgcggcaacggcaagggggcatcacggcagaggtgatgatgggcatcctcagagacaaggagagtggtatctgtatggactcgggaggctttcgcaccacggccagcatggtgtctgtcctgccccaggatcccacgcagccctgcgtgcactttcttaccgccacgccagacccatccaggtctgtgttcaaacctttcatcttcggggtgggggtggcccaggccccccaggtgctgtcccccacttttggagcacaagaccctgttcggaccctgccccgattccagactcaggtagatcgtcggcataccctctaccgtggacaccaggcagccctggggctgatggagagagatcaggtatcccccagggagtaggggctaccttgaggggatgatagacctcccccactcccagtgggactctggaaatatgaaggaactagggagtggaagagatttcagagctggggagaggagttcctcccttcaaagccagcaactgcctttggggaatgtcggggggtatctcctttctcctgcttgtgtgaggtggtacacagtccccccttcacctggcgggaagcctgtcccggacagactcatctcagctttcccttggggcaggatcgggggcagcagctccagcagaaacagcaggatctggagcaggaaggcctcgaggccacacaggggctgctggccggcgagtgggccccacccctctgggagctgggcagcctcttccaggccttcgtgaagagggagagccaggcttatgcgtaagcttcatagcttctgctggcctggggtggacccaggacccctggggcctgggtgccctgagtggtggtaaagtggagcaatcccttcacgctccttggccatgttctgagcggccagcttggcctttgccttaataaatgtgctttattttcaaaaaaaaaaaa

SEQ ID NO: 79 - DNA, 2495 bp, Homo sapiens
  CDS (193)..(1644)
acgaggacaggaggctcaagggggcggaggcggcgttgccgggctctccggaaggagacgtggcggcggttgggccggtgatacccgggcgctttatagtcccgccgcctcctcctccacctcctcctcctcctcctctcctcctggagcagaggaggttgtggcggtggctggagaaagcggcggcggaggatggaggaaggaggcggcggcgtacggagtctggtcccgggcgggccggtgttactggtcctctgcggcctcctggaggcgtccggcggcggccgagcccttcctcaactcagcgatgacatccctttccgagtcaactggcccggcaccgagttctctctgcccacaactggagttttatataaagaagataattatgtcatcatgacaactgcacataaagaaaaatataaatgcatacttccccttgtgacaagtggggatgaggaagaagaaaaggattataaaggccctaatccaagagagcttttggagccactatttaaacaaagcagttgttcctacagaattgagtcttattggacttacgaagtatgtcatggaaaacacattcggcagtaccatgaagagaaagaaactggtcagaaaataaatattcacgagtactaccttgggaatatgttggccaagaaccttctatttgaaaaagaacgagaagcagaagaaaaggaaaaatcaaatgagattcccactaaaaatatcgaaggtcagatgacaccatactatcctgtgggaatgggaaatggtacaccttgtagtttgaaacagaaccggcccagatcaagtactgtgatgtacatatgtcatcctgaatctaagcatgaaattctttcagtagctgaagttacaacttgtgaatatgaagttgtcattttgacaccactcttgtgcagtcatcctaaatataggttcagagcatctcctgtgaatgacatattttgtcaatcactgccaggatctccatttaagcccctcaccctgaggcagctggagcagcaggaagaaatactaagggtgccttttaggagaaataaagaggaagatttgcaatcaactaaagaagagagatttccagcgatccacaagtcgattgctattggctctcagccagtgctcactgttgggacaacccacatatccaaattgacagatgaccaactcataaaagagtttcttagtggttcttactgctttcgtgggggtgtcggttggtggaaatatgaattctgctatggcaaacatgtacatcaataccatgaggacaaggatagtgggaaaacctctgtggttgtcgggacatggaaccaagaagagcatattgaatgggctaagaagaatactgctagagcttatcatcttcaagacgatggtacccagacagtcaggatggtgtcacatttttatggaaatggagatatttgtgatataactgacaaaccaagacaggtgactgtaaaactaaagtgcaaagaatcagattcacctcatgctgttactgtatatatgctagagcctcactcctgtcaatatattcttggggttgaatctccagtgatctgtaaaatcttagatacagcagatgaaaatggacttctttctctccccaactaaaggatattaaagttaggggaaagaaaagatcattgaaagtcatgataatttctgtcccactgtgtctcattatagagttctcagccattggacctcttctaaaggatggtataaaatgactctcaaccactttgtgaatacatatgtgtatataagaggttattgataaacttctgaggcagacatttgtctcgctttttttcatttttgttgtgtcttataaactgactgtttttctttgcttggatactgtgattccaaaataaatctcatccaagcaagttagagtccagcctaatcaaatgtcataattgttgtacctattgaaagtttttaaataatagatttattatgtaaattatagtatatgtaagtagctaatgaagtaaagatcatgaagaaagaaattgataggtgtaaatgagagaccatgtaaaatatgtaaattctagtacctgaaatcctttcaacagatttttatatagcaactgctctctgcaagtagttaaactagaaactgggcacatggtagaggctcacatgggagttgtcctcacccttgttaatctcaagaaactcttatttataataggttgcttctctctcagaacttttatctattacttttttcttcttatgagtatgtttactctcagagtatctatctgatgtagacagttggtgatgcttctgagactcagaatggtttactctaacaaaacactgtgctgtctatcccttgtacttgcctactgtaatatggatttcacttctgaacagtttacagcacaatatttattttaaagtgaataaaatgtccacaagcagtgttgtcatgtaaaaaaaaaaaa

SEQ ID NO: 80 - DNA, 923 bp, Homo sapiens
  CDS (316)..(579)
attggaaggcttggaaggacgatgtatataactatctattcgatgatgaagataccccaccaaacccaaaaaaagagatctctcgaggatccgaattcgcggccgcgtcgaccaggaaatgacccgaactgccagcctgcgcctttgcagccggccctcgctttgctgaagacgagcagctcccaccaaagtcttgcctccccttaccccgaaagccccgctcagttcaatatttcaagtgaaaatctgcctgttcgaaaagaaaatattcacaaatgagcagtgtattagaagacaactgaattgcttctaagaatgggtctcactctgccatcacccaggctggagtgtggtggcaccatcatggctcactgcagccttgaactcctgagctcaagtcatcctcccacctcagccttccgagtagctggaactgcaggtgtgagccaccatgcctggctgatttgtctttttaaattttttatagagaccgagtctcaactatattgtccaggctggaaaagaacttctttccctccaagtgataaccttttccagacaagtcagcttaaaaactgacccaaaggccctgaagtacacagttttcttggagaaagaaaaaaataagtgaaaaggacttgctgacttgctaattcattttggggcctgtgggtaacatcagaatggcaaagcacttggggctttttttctaatttgtatttttttaatcttctgagaaatgacttttatatgccaagattcattccatgattagtttttatgaccaagttatgaacgcttttgaatatggggacctagaatagaaatgctaacctacctgcaaggagagctctgtgattggcatccccatcatgctgtaactgacacaaaataaacttagggtaattgccaaaaaaaaaaaa

SEQ ID NO: 81 - DNA, 900 bp, Homo sapiens
  CDS (115)..(318)
  misc_feature (1)...(900): n = a,t,c or g
atttggccctcgaggccaagaattcggcacgagaaaggatactctccaaaaagttcgagaaaatctagatagacgctaacaggaattggaaaataacacccctggtaccaaaacatgtttaactggaatctatggctaactactctaatcactggattggcgggaccccttctcctcctcttgttaggtttagtcttcgggccttgtatattaaattggtttcttaaatttataaagcagttcatagcttctgtcaaacttacgtatcttaaaacccaatataactcccttgttgtgactgaagaatcaatgatttgattacccaaaacatgagtggggaatgtgatacctaccctattttaacctgccccaagtttacgtgtacagtgggtcagaagggtgacttctgacccttctgctcagagtgactctctcttagctgagatagctggacactctccattttagcttcttcacttgcagtccccttatccccctcccttaagggaataactagtgcaagctgactccaagcacatccaggaatgcacttactgataagatattgaggcaagctgtaccagcagctcctggggacgtgctcggcggatggtacccaagcccctgcatttatctctttgtgatagtttaagcccctgcacctggaactgtatttttctgtaactatctctgtaaccattaatttttttaactttttgcctgttctgcttctgtaaaaattgcttcaagtaggctccccctcccctatttagaccatggtttaaaaagaaatctatcccgttcttcgaggccaagagaattttgagctctagccatctctcggtcgccggcaataaaaggactcctgaattanncnnannnnnanaaaaaaaaaaaaaa

SEQ ID NO: 82 - DNA, 369 bp, Homo sapiens
  CDS (70)..(309)
atctggtcgatcgtttcctggccctcgcctcctgcgctgtgtccctggaattcttgcacgtcgcccaagatgtctgatgctgacgttgagaaagctgccaaggatgttacgcaccttaagaccattccttcggatgaggagatgctgctcatctatggccactactatcaagcaactgggggcgacataaatacagaacgggccggcatgttggacttcactggcaatgacacgtgggatgcctggaatgagctgaaagggacttccaaggaagatgccatgctagcttacatcagcaaagttgtatagctattgaaaaaatacgggatattgagagactggacttgatactgtgccatgcgatatgcc

SEQ ID NO: 83 - DNA, 5442 bp, Homo sapiens
  CDS (2251)..(2820)
atggagaacgtttttactgtgtcatcagatcctcatccctctcctgcagcccctccttcactttctttacccttatcttcatcttctacctcatctgggactaaaaaacaaaagaggaccccaacttatcagagatctatgagctttgatccaaaccttctccacaacaatggacataatgggtaccctaatggtacttcagcagcactgcgtgaaactggggttattgaaaaactgttaacctcttacggatttattcagtgttcagaacgtcaagctagacttttcttccactgttcacagtataatggcaacctgcaagacttaaaagtaggagatgatgttgaatttgaagtatcatcggaccgacggactgggaaacccattgctgttaaactggtgaagataaaacaagaaatcctccctgaagaacgaatgaatggacaagaagtgttttatctgacttacacccctgaagatgtcgaagggaacgttcagctggaaactggagataaaataaactttgtaattgataacaataaacatactggtgctgtaagtgctcgcaacattatgctgttgaaaaagaaacaagcccgctgtcagggagtagtttgtgccatgaaggaggcatttggctttattgaaagaggtgatgttgtaaaagagatattctttcactatagtgaatttaagggtgacttagaaaccttacagcctggcgatgatgtggaattcacaatcaaggacagaaatggtaaagaagttgcaacagatgtcagactattgcctcaaggaacagtcatttttgaagatatcagcattgaacattttgaaggaactgtaaccaaagttatcccaaaagtacccagtaaaaaccagaatgacccattgccaggacgcatcaaagttgactttgtgatccctaaagaacttccctttggagacaaagatacgaaatccaaggtgaccctgctggaaggtgaccatgttaggtttaatatttcaacagaccgacgtgacaaattagagcgagcaaccaatatagaagttctgtcaaatacatttcagttcactaatgaagcccgagaaatgggtgtgattgctgccatgagagatggttttggtttcatcaagtgtgtggatcgtgatgttcgtatgttcttccacttcagtgaaattctggatgggaaccagctccatattgcagatgaagtagagtttactgtggttcctgttgaatttagtattagtgacaaacagaggcctggacagcaggttgcaacttgtgtgcgacttttaggtcgtaattctaactccaagaggctcttgggttatgtggcaactctgaaggataattttggatttattgaaacagccaatcatgataaggaaatctttttccattacagtgagttctctggtgatgttgatagcctggaactgggggacatggtcgagtatagcttgtccaaaggcaaaggcaacaaagtcagtgcagaaaaagtgaacaaaacacactcagtgaatggcattactgaggaagctgatcccaccatttactctggcaaagtaattcgccccctgaggagtgttgatccaacacagactgagtaccaaggaatgattgagattgtggaggagggcgatatgaaaggtgaggtctatccatttggcatcgttgggatggccaacaaaggggattgcctgcagaaaggggagagcgtcaagttccaattgtgtgtcctgggccaaaatgcacaaactatggcttacaacatcacacccctgcgcagggccacagtggaatgtgtgaaagatcagtttggcttcattaactatgaagtaggagatagcaagaagctctttttccatgtgaaagaagttcaggatggcattgagctacaggcaggagatgaggtggagttctcagtgattcttaatcagcgcactggcaagtgcagcgcctgtaatgtttggcgagtctgtgagggccccaaggctgttgcagctcctcgacctgatcggttggtcaatcgcttgaagaatatcactctggatgatgccagtgctcctcgcctaatggttcttcgtcagccaaggggaccagataactcaatgttttctgttaatggcgaaagaatggaagcgaataaagttttactgatttttgagacactagcacctagcgctttcatgcacgaggtccaaagcagaggcagtggagcttgaggttcttgctggtgtgaaatgactgagtacaaactggtggtggttggagcaggtggtgttgggaaaagcgcactgacaatccagctaatccagaaccactttgtagatgaatatgatcccaccatagaggattcttacagaaaacaagtggttatagatggtgaaacctgtttgttggacatactggatacagctggacaagaagagtacagtgccatgagagaccaatacatgaggacaggcgaaggcttcctctgtgtatttgccatcaataatagcaagtcatttgcggatattaacctctacagggagcagattaagcgagtaaaagactcggatgatgtacctatggtgctagtgggaaacaagtgtgatttgccaacaaggacagttgatacaaaacaagcccacgaactggccaagagttacgggattccattcattgaaacctcagccaagaccagacagggtgttgaagatgctttttacacactggtaagagaaatacgccagtaccgaatgaaaaaactcaacagcagtgatgatgggactcagggttgtatgggattgccatgtgtggtgatgtaacaagatacttttaaagttttgtcagaaaagagccactttcaagctgcactgacaccctggtcctgacttccctggaggagaagtattcctgttgctgtcttcagtctcacagagaagctcctgctacttccccagctctcagtagtttagtacaataatctctatttgagaagttctcagaataactacctcctcacttggctgtctgaccagagaatgcacctcttgttactccctgttatttttctgccctgggttcttccacagcacaaacacacctctgccaccccaggtttttcatctgaaaagcagttcatgtctgaaacagagaaccaaaccgcaaacgtgaaattctattgaaaacagtgtcttgagctctaaagtagcaactgctggtgattttttttttctttttactgttgaacttctgggaaaagggagcctctggggaggcacggagtctctggggaaaagaaggacccaagcagacctaggatagtgagaagggttgcagatagcataaaccaaccaaagaaaacagatccagagaaagagagagggaagagaaaaaagaaggaaccagagaaaagaaggaagatgagagagagaacagttggtcaattaataaatctctgccacatggacttgcagaatcagcatcatattggtgaaactgctgtgcagccgtccgtcgatgctccaaatatagttttaatgaccagtgctgggtccccttctcatgtaactgacccacttagggttacagttgaagattttgaaattgtttgcaaaggtctgtatcgggcactatgcatacgtgagaaatacatgcagaagtcgtttcagaggttccctaaaaccccttccaaatacttgcggaacattgatggtgaggcttgggtagcaaatgagagcttctatccagtctttactcctcctgtgaagaagggagaggaccccttccgaacagacaaccttcctgaaaacctgggctatcacctcaaaatgaaggacggtgtagtttacgtctatcctaatgaagcagcagtcagcaaagatgagcctaagccacttccttacccaaatctggacaccttcttagacgatatgaattttttacttgctttaattgctcaaggacctgttaagacctatacccaccggcgcctgaagttcctctcctccaagttccaggtccatcagatgcttaacgagatggacgagttaaaggagctgaaaaacaacccccaccgagatttttataactgcaggaaggtggacacccatatccatgcagccgcttgcatgaaccagaaacatctgctgcgttttattaagaaatcttaccaaattgatgctgacagagtggtctatagcaccaaagagaagaatctgaccctaaaggaactttttgctaaattaaaaatgcatccttatgacctgactgttgattctctggatgttcatgctggacgccagaccttccagcgttttgataagttcaatgacaaatataatcctgtaggagcaagtgagctacgggacctctacttgaagacagacaattacattaatggggaatattttgccactatcatcaaggaggtaggtgcggacctggtggaggccaagtaccagcatgctgagccccgcctgtccatctatggccgcagtcctgatgagtggagcaaactctcctcctggttcgtctgcaatcgcatccactgccccaacatgacatggatgatccaggttcccaggatctatgatgtgttccgttccaagaatttccttccacattttggaaaaatgctggagaatattttcatgccagtgtttgaggccaccatcaacccccaggctgacccagaactcagtgtcttcctcaagcatatcactggctttgacagtgtggatgatgagtccaaacacagtggccacatgttctcctccaagagtcccaagccccaggagtggacattggaaaagaatccatcttacacttactatgcctactacatgtatgcaaacatcatggtgctcaacagcctgagaaaggaacgaggcatgaatacgtttctgttccgacctcactgtggagaagctggagccctcacccatctcatgacagcattcatgatagcagatgatatctctcatggcctaaatttaaaaaagagtcccgtgctacagtacttgtttttcttagcccaaattcccatcgccatgtcaccactaagtaacaatagcctatttctagagtatgccaaaaatccttttttggatttccttcagaaagggctaatgatctcactgtctacagatgacccaatgcaattccactttaccaaggagcccctaatggaagaatatgctattgctgcacaagtcttcaagctgagcacctgtgatatgtgcgaagtggcaaggaacagtgtcttgcagtgtggaatttctcatgaggagaaagtaaagtttctgggcgacaattaccttgaggaaggccctgctggaaatgatatccggaggacaaatgtagcccaaatccgcatggcctatcgctatgaaacctggtgttatgaactcaatttaattgctgagggtcttaaatcaacagaataa

SEQ ID NO: 84 - DNA, 1628 bp, Homo sapiens
  CDS (203)..(1354)
ggctgcattccagtatggtatcaaaatgtctgaagggcggaaaaccaggcgcttcaaggaaaccaatgacaaagcagagcttgatcgccagtggaagaagattagtgcaatcattgagaagaggaagaagatggaagctgatggtgtgggtggttccgaggctgactaccctgcggcggcgcggctcgcagtccttctcagcatggaccgcacttgtgaggagaggcccgctgaggatgggagcgacgaggaggacccagactccatggaagccccaacccggatccgggacactccggaagacatcgtgctggaagctccggctagtgggctggcgttccatccggcccgtgacctactggctgcaggggacgtggacggggacgtgttcgtcttttcctactcttgccaagagggagaaaccaaggagctctggtcatcaggtcaccatctcaaggcctgccgagctgtggccttctctgaagatgggcagaagctcattactgtctccaaggacaaagccatccatgttctagatgtggagcagggccaactggaaagacgtgtttccaaggctcatggtgcccccatcaatagtcttctgctggtggatgagaatgttctggccactggggatgacacaggtggtatccgtctctgggaccagcggaaggagggccccttaatggatatgaggcaacatgaagagtacatcgcagacatggctctggatccagccaaaaagctgctgctgacagccagcggggatggctgccttggcatcttcaacattaagaggcgtcggtttgagctgctctcagaacctcagtctggggacctgacctctgtcactctcatgaaatgggggaagaaggtagcctgtggctccagtgaaggtaccatctacctcttcaattggaatggctttggggccacaagtgaccgctttgccctgagagctgaatctatcgactgcatggttccagtcaccgagagtctgctgtgtactggctccactgatggagtcatcagggctgtgaacatcctaccgaaccgagtggtgggcagtgtgggccagcacactggggagcctgtggaggagctggccctctcccactgtggccgcttcctggccagtagtggccatgaccagcgcctcaagttttgggacatggcccagctgcgagctgtggtggtggatgactaccgtcggcgcaaaaaaaagggaggaccactgcgggctctgagcagcaagacttggagcaccgatgacttcttcgcaggactgagggaagagggagaagactccatggctcaggaagaaaaggaggagactggggatgacagtgactgaaggaatgaattgaatcttgagacgggtcctcaccaggcaagagtcttgcttattgggctgcatccccagagaggatatgaattattttttgaaaagacagggttttgccatcgtccaggctggagtgcgctggcttgatcttggctcactgcagcctcaatgtccccaggctcagattgtccttccaccttagcctctggagcagctgggactacaggtgtgcactaccacaccaggccctgtattgcggccgctctagaggatccaagcttgc

SEQ ID NO: 85 - DNA, 897 bp, Homo sapiens
  CDS (183)..(554)
ggtgcggaatccccgggtcgacccacgcgtccggacagagcggcccggtcgccggcatggtttctccgtcctgctgcagccggcgggaggcagccagtccaggcgcccgctagcttcggcggcgacccagacggggaaagcggaaggaatgtcgcgtgcaagcaggcagctggtgtggaagaatggcggtgagccattcagtgaaggagcggaccatctctgagaacagcctgatcatcctactgcagggcctccagggccgggtaaccactgtggacctgcgggatgagagcgtggcccacggacgcatagacaatgtcgatgctttcatgaacatccgcctggccaaagtcacctacacggaccgttgggggcatcaggtcaagctggatgacctctttgtgacaggccgcaatgtccgctacgtccacatcccagatgacgtgaacatcacctcgaccattgagcagcagctgcagattatccatcgggtgcgaaactttggtggcaagggccaaggccggtgggaatttcccccaaaaaactgtaagtgaggccctcagcaagccctggccccaactcggagtcctccagtgatctccggagctagttccctgccctcacaccctgtctggtacccgagaagaaagcagggccaggccagaagctggtgtccaacagacaccacctgtcaaagctgcctttcacagggttccacctcccagactcactctgggacccagaatcctatatgtggccttggggtaggtgacaatccccctttttgatgatctgaatctctgacttattgattatggaacctgtcaagtagttttcaactctcccagtgaggataattaaacatgctcagcctgagccacctctaaaaaaaaaaaa

SEQ ID NO: 86 - DNA, 694 bp, Homo sapiens
  CDS (57)..(323)
taagcttgcggccgcttaattaaagatcttttttttttttttttttttttaagtttatgagatttattttatttatttttcgaaacagggtcttgctctgtcattcaggctggagtacagtggcatggtcacagctcatcacaggctcaacctccaggctcgaacaagcctcccacatcagcccccccgccccaagtagctgggactacaggtgcacaccaccacaactggctaattttatgtatttatttatttatttatttagtagagacagggactcaccgtgttgcccagactggcctcaaacttctgggctcaagtgatcctcccacctcggcctcccaaagtgttgggattacaggtgtgaactaccatacccagacagtttatgctattaaaaaccagcattaggggaggtattccaccaacataacctaagcaacaactctgtttcaagatctgtattccaagcatctcctacaatatcttttaaacccttcagcagcctccctaagcggcggggggtgttgttattccagtttgaggaaagaggaaccagggcctaccaggggtgagtaatttcaccaatgtcattacaggctgataaatgaaggaagattttaaaagatctgtcctcgtgccgctcgtgccgctcgtgccgctcgtgccgaattcttggcctcgagggccaaat

SEQ ID NO: 87 - DNA, 1780 bp, Homo sapiens
  CDS (14)..(1723)
cttgtatagcgtgatgtatataactatctattcgatgatgaagataccccaccaaacccaaaaaaagagatctctcgaggatccgaattcgcggccgcgtcgacctgaaaccctgggcggcggcaagctgtgcgacctcttctgcggccggcctgggcaggtgtcttcctcgagaggcaggcaggggatcccggacgcaaaatatggtatttcaggggaaaaggatgtcagtcctgacttgtcatgtgctgatgaaatatcagaatgttatcacaaacttgattctttaacttataagattgatgagtgtgaaaagaaaaagagggaagactatgaaagtcaaagcaatcctgtttttaggagatacttaaataagattttaattgaagctggaaagcttggacttcctgatgaaaacaaaggcgatatgcattatgatgctgagattatccttaaaagagaaactttgttagaaatacagaagtttctcaatggagaagactggaaaccaggtgccttggatgatgcactaagtgatattttaattaattttaagtttcatgattttgaaacatggaagtggcgattcgaagattcctttggagtggatccatataatgtgttaatggcacttctttgtctgctctgcatcgagggtttagtggctaccgagctgtggacatatgtacgttggtacactcagttgagacgtgttttaatcatcagctttcttttcagtttgggatggaattggatgtatttatataagctagcttttgcacagcatcaggctgaagtcgccaagatggagccattaaacaatgtgtgtgccaaaaagatggactggactggaagtatctgggaatggtttagaagttcatggacctataaggatgacccatgccaaaaatactatgagctcttactagtcaaccctatttggttggtcccaccaacaaaggcacttgcagttacattcaccacatttgtaacggagccattgaagcatattggaaaaggaactggggaatttattaaagcactcatgaaggaaattccagcgctgcttcatcttccagtgctgataattatggcattagccatcctgagtttctgctatggtgctggaaaatcagttcatgtgctgagacatataggcggtcctgagagcgaacctccccaggcacttcggccacgggatagaagacggcaggaggaaattgattatagacctgatggtggagcaggtgatgccgatttccattataggggccaaatgggccccactgagcaaggcccttatgccaaaacgtatgagggtagaagagagattttgagagagagagatgttgacttgagatttcagactggcaacaagagccctgaagtgctccgggcatttgatgtaccagacgcagaggcacgagagcatcccacggtggtacccagtcataaatcacctgttttggatacaaagcccaaggagacaggtggaatcctgggggaaggcacaccgaaagaaagcagtactgaaagcagccagtcggccaagcctgtctctggccaagacacatcagggaatacagaaggttcacccgcagcggaaaaggcccagctcaagtctgaagccgcaggcagcccagaccaaggcagcacatacagccccgcaagaggtgtggctggaccacgtggacaggatccggtcagcagcccctgtggctagaggaacaccagcacaaacgacagcctcaagtctccttcgagctttatatccatttgg

SEQ ID NO: 88 - DNA, 623 bp, Homo sapiens
  CDS (36)..(554)
gcttataatttggctaattatccaccttaatcaccatgaaaatttataaggatcttattactgatgatgaacttttctcagacacctatcccatgaaacttattgatggtgtaatctatgaagtaacaggaaggcttgtcactcgtaaagttggagatgtccagttaattggttctaacccttctgctgaagatgttgatgaaggaactgaagaagcagttgaatcaggatgtgatatagttctgaatcatagactacaagaaagttatgcttttggtgataaaaagggatacaccttgtatttgaaggaatatatgaaaaggattgttgataagcttcaagaaacgaatccttcagaagtagacacatttaaaactaacattaataaatatatgaaggatgtccttggaaggttcaaggatcttcaattctttactggtgaatctacagacatagatggcatggtcgctcttcttgaatacagagatttaaacggtgaaagcagacccgtgatgatgtttttcaagcatggccttattcaagaaaaatgctaatgtattccaattgttaacaccttttgttattcttggaaacaaaggtctttgaaagccaaaaaaaaaaaa

SEQ ID NO: 89 - DNA, 472 bp, Homo sapiens
  CDS (24)..(275)
gcacgagtaacaaccgagccaagatgttgcggaatctgctggcccttcgtcagattgcccagaggaccatcagcaccacttcacgaaggcattttgaaaacaaggttccagagaaacaaaagctgtttcaggaggataatgggatgccagttcatctgaaaggcggggcatctgatgccctcctctacagagccacaatggctctgacgcttggtggcacagcctatgccatctatctgttagctatggctgcatttcccaagaagcagaactaatgtcgtcatcccagtcttcacgtggttcagtttcatcaacgctcgatggaccaggaatctgatgagtaactgagctcttctttggggatcaatatttattgatgtgtattaactgctgccaataaagcaatccttaaccattttgtgtctcccttttcacttgagaataaattcctggtaataccaaaaaaaaaaaa

SEQ ID NO: 90 - DNA, 1222 bp, Homo sapiens
  CDS (62)..(1102)
atttggccctcgaggccaagaattcggcacgagggaattctgctggcgctgcagctgcagaatggtcggcggtggcgggaagcgcaggcccggcggagaggggccgcagtgtgaaaaaacaactgatgtgaagaaaagtaaattctgtgaagctgatgtctccagtgaccttcgaaaagaagtagaaaatcattataagctttctttacctgaagatttctatcacttctggaagttctgtgaagaacttgatcctgaaaagccatctgattcactttctgcaagccttggacttcaattagttggtccttatgatatccttgctggaaaacataaaacgaagaaaaaatcaacaggcctgaattttaaccttcactggaggttttactatgatcctcctgagttccagaccattattattggagataataaaactcagtaccacatggggtatttcagggattctcctgatgaatttcctgtatatgttggtataaatgaagcaaagaaaaattgtataattgttccaaatggagataatgtatttgctgcagtcaaattatttttgacgaaaaaacttaaagaaataacggataaaaagaaaatcaatctcttgaaaaacatagatgaaaaactcacagaagcagccagagaattggggtactcgcttgaacagagaaccgtgaagatgaaacagagagataagaaagttgtgacaaagacctttcatggtgcaggcttggttgttccagtagataaaaatgatgttgggtaccgagagctccctgaaacagatgctgacctcaagagaatttgcaagacaatagttgaggctgcaagtgatgaggagagactaaaagcttttgctcccattcaggaaatgatgacttttgtgcagtttgctaatgatgaatgtgattatggcatggggcttgaattgggaatggatctcttttgctatggctcacattattttcataaagttgctggccagcttttacctcttgcatataatctgttgaagaggaatctgtttgcagaaattattgaggagcatctggcaaacagaagtcaagagaacatagaccaacttgctgcatgagtaaggtggctttgattggtgtacagtatttcaaaggactagtattaaacttgtgatttttgttttgtttttaaggaatacaaaaaataaacatttactaaaaacgttaaaaaaaaaaaa

SEQ ID NO: 91 - DNA, 1029 bp, Homo sapiens
  CDS (43)..(882)
atttggccctcgaggccaagaattcggcacgaggaacgaaagatggcggcgcccgtaaggcggacgctgttaggggtggcggggggttggcggcggttcgagaggctctgggccggcagtctaagctctcgcagcctggctcttgcagccgcaccctcaagcaacggatccccatggcgcttgttgggcgcgttgtgcctgcagcggccacctgtagtctccaagccgttgaccccattgcaggaagagatggcgtctctactgcagcagattgagatagagagaagcctgtattcagaccacgagcttcgtgctctggatgaaaaccagcgactggcaaagaagaaagctgaccttcatgatgaagaagatgaacaggatatattgctggcgcaagatttggaagatatgtgggagcagaaatttctacagttcaaacttggagctcgcataacagaagctgatgaaaagaatgaccgaacatccctgaacaggaagctagacaggaaccttgtcctgttagtcagagagaagtttggagaccaggatgtttggatactgccccaggcagagtggcagcctggggagacccttcgaggaacagctgaacgaaccctggccacactctcagaaaacaacatggaagccaagttcctaggaaatgcaccctgtgggcactacacattcaagttcccccaggcaatgcggacagagagtaacctcggagccaaggtgttcttcttcaaagcactgctattaactggagacttttcccaggctgggaataagggccatcatgtgtgggtcactaaggatgagctgggtgactatttgaaaccaaaatacctggcccaagttaggaggtttgtttcagacctctgatgggccgagctgcctgtggacggtgctcagacaagtctgggattagagcctcaaggacattgtgtgattgcctcacatttgcaggtaatatcaagcagcaaactaaattctgagaaataaacgagtctattactgaaaaaaaaaaaa

SEQ ID NO: 92 - DNA, 1402 bp, Homo sapiens
  CDS (68)..(670)
atttggccctcgaggccaagaattcggcacgagggcaccaccactgacctgggacagtgaatcgacaatgccgtcttctgtctcgtggggcatcctcctgctggcaggcctgtgctgcctggtccctgtctccctggctgaggatccccagggagatgctgcccagaagacagatacatcccaccatgatcaggatcacccaaccttcaacaagatcacccccaacctggctgagttcgccttcagcctataccgccagctggcacaccagtccaacagcaccaatatcttcttctccccagtgagcatcgctacagcctttgcaatgctctccctggggaccaaggctgacactcacgatgaaatcctggagggcctgaatttcaacctcacggagattccggaggctcagatccatgaaggcttccaggaactcctccgtaccctcaaccagccagacagccagctccagctgaccaccggcaatggcctgttcctcagcgagggcctgaagctagtggataagtttttggaggatgttaaaaagttgtaccactcagaagccttcactgtcaacttcggggatcaccgaagaggccaagaaacagatcaacgattacgtggagaagggtactcaagggaaaattgtggatttggtcaaggagcttgacagagacacagtttttgctctggtgaattacatcttctttaaaggcaaatgggagagaccttttgaagtcaaggacaccgaggacgaggacttccacgtggaccaggtgaccaccgtgaaggtccctatgatgaagcgtttaggcatgtttaacatccagcactgtaagaagctgtccagctgggtactgctaatgaaatacctgggcaatgccaccgccatcttcttcctacctgatgaggggaaactacagcacctggaaaatgaactcacccacgatatcatcaccaagttcctggaaaatgaagacagaaggtctgccagcttacatttacccaaactgtccattactggaacctatgatctgaagagcgtcctgggtcaactgggcatcactaaggtcttcagcaatggggctgacctctccggggtcacagaggaggcacccctgaagctctccaaggccgtgcataaggctgtgctgaccatcgacgagaaggggactgaagctgctggggccatgtttttagaggccataccaatgtctatccccccagaggtcaagttcaacaaaccctttgtcttcttaatgattgaacaaaataccaagtctcccctcttcatgggaaaagtggtgaatcccacccaaaaataactgcctctcgctcctcaacccctcccctccatccctggccccctccctggatgacattaaagaagggttgagctgga

SEQ ID NO: 93 - DNA, 955 bp, Homo sapiens
  CDS (177)..(749)
ccccccccgcgcgccgtgcgttgaaaccatgattacgtgaccagctggctagcgtttaaacttaagcttggtaccgagctcggatccactagtccagtgtggtggaattcggagttgctctaggtcgtaaccagcctttgaaaaaggagaaaccaaaatggaaaagcgattatcctatgacagatggacaactacgcagcaagagggatgaattttgggatacagcaccagcttttgaaggccggaaagagatttgggatgccttgaaggctgctgcacatgcttttgagagcaatgatcatgaactggcacaagcaatcattgatggtgcaaacataacattaccacatggtgcacttacagagtgctacgatgaactggggaacagatatcagcttccagtgtattgcttggcaccgccaatcaacatgatagaggaaaagagcgacatagagactctggatattcctgagccaccacccaattctggatatgaatgtcagcttcgtttgcgcctttccacaggcaaagacctcaagcttgtggttcgcagcacagacacagtattccacatgaagagacggttgcatgcagcagagggagtggaaccaggtagtcagcggtggtttttttctggcagacctctcactgacaaaatgaagttcgaagagctgaagatcccaaaggactatgttgtacaggttatagtgagccaacctgtgcagaacccaacaccagtggagaactgaactgagccctgttggccagctcccacatccctctgctcctttttatggttcttgttgtcatttcctactctgcggcgtgaaatctatttcactgctctaaattccctatgaatggatttagttctgaggaattaccagtgaaaaattccatctgtgatggagaccaacaaaaataataaaacacaaagagccagaaaaaaaaaaaa

SEQ ID NO: 94 - DNA, 1376 bp, Homo sapiens
  CDS (137)..(754)
  misc_feature (1)...(1376): n = a,t,c or g
agaaaaaaaattaganaccctttcgattacccttgcaggtaccggtccggaattcccgggtcgacccacgcgtccgcccacgcgtccggtccagtcggtcttcctccggcccgggccctggcccagctagccggccatggaaggtaatggccccgctgctgtccactaccagccggccagccccccgcgggacgcctgcgtctacagcagctgctactgtgaagaaaatatttggaagctctgtgaatacatcaaaaaccatgaccagtatcctttagaagaatgttatgctgtcttcatatctaatgagaggaagatgatacctatctggaaacaacaggcgagacctggagatggacctgtgatctgggattaccatgttgttttgcttcatgtttcaagtggaggacagaacttcatttatgatctcgatactgtcttgccatttccctgcctctttgacacttatgtagaagatgcctttaagtctgatgatgacattcacccacagtttaggaggaaatttagagtgatccgtgcagattcatatttgaagaactttgcttctgaccgatctcacatgaaagactccagtgggaattggagagagcctccgccgccatatccctgcattgagactggagattccaaaatgaacctgaacgatttcatcagtatggatcccaaggtaggatggggcgccgtctacacactatccgaatttacacatcggtttggcagtaaaaactgctgaacttggtctcaagatgtggaactgtggagaaattctaggacatgaacaagctatcctttcatcgaggacagcaaacattatggtacagttggcttggaattatgtctttctcttttaatttgattgagtggaaatctgagtgaatacaaatataaatgaacaacataaaaacttttgttttgacatgtcaaattgaaacttgataaagtgcgtacttgctaagatattcctgtggctcatgcgttacaacacgaggacttaagccagtaatcgtttttgttcagatagaggtgtggaggtagagccagcccctcatgtctgttttggatgttttgtgtctctccagctacattgtaagttccttgagggcagggccatggcccattgctctgtgaatctcaaatgcccataaaaggtgcccataaaatgttttcttgaacatttgaatgtgctgttgtctggaaaggggtaatattgtgagctgaatcagcaataagtattagtctttttggactatggtattgttaaaaagactgcagccctctcagacttgagcgttaattggcttatttatttatggctttaaataaaatcgatttaacgttaaaaaaaaaaaaaaaaa

SEQ ID NO: 95 - DNA, 764 bp, Homo sapiens
  CDS (411)..(614)
atttggccctcgaggccaagaattcggcacgagacctcttctcataccctgtgctaacaacttttaacaaaaaatttgcatcacttttaagaatcaagaaaaatttctgaaggtcatatgggacagaaaaaaaaaccaagggaaaaatcacgccacttgggaaaaaaagattcgaaatctgcctttttatagatttgtaattaataaggtccaggctttctaagcaacttaaatgttttgtttcgaaacaaagtacttgtctggatgtaggaggaaagggagtgatgtcactgccattatgatgccccttgaatataagaccctacttgctatctcccctgcaccagccaggagccacccatcctccagcacactgagcagcaagctggacacacggcacactgatccaaatgggtaaggggatggtggcgatgctcattctgggtctgctacttctggcgctgctcctacccgtgcaggtttcttcatttgttcctttaaccagtatgccggaagctactgcagccgaaaccacaaagccctccaacagtgccctacagcctacagccggtctccttgtggtcttgcttgcccttctacatctctaccattaagaggcaggtcaagaaacagctacagttctccaacccatacactaaaaccgaatccaaatggtgcctagaagttcaatgtggcaatcccgaaaaaaaagaccaaaaaaagacctttaattaagcggccgcaagcttatcccagctatagct

SEQ ID NO: 96 - DNA, 1089 bp, Homo sapiens
  CDS (126)..(839)
taagcttgcgccgatcttttttttcttttttttttttttggaaccgcggttgtttaaaagcctgagggaacctggaggggggctcccactctctaccttctttcctccgagtttgtgactccgagatggacaaagtgtgtgctgtttttggaggctcccgaggcattggcagagctgtggcccagttaatggcccggaaaggctaccgactggcggtcattgccagaaacctggaaggggccaaagccgccgccggtgacctcggcggagatcatttggcatttagctgtgatgttgctaaagaacatgatgttcaaaatacatttgaagagatggagaaacatttaggtcgagtaaatttcttggtaaatgcagctggtattaacagggatggtcttttagtaagaacaaaaactgaagatatggtatctcagcttcatactaacctcttgggttccatgctgacctgtaaagctgccatgaggactatgattcaacaacagggagggtctattgttaatgtaggaagcattgttggcttaaaaggcaactctggccagtccgtttacagtgccagtaaaggaggattagttggattttcacgtgctcttgctaaagaggtagcaagaaagaaaattagagtgaatgtagttgcaccaggatttgtacacacagatatgacgaaagacttgaaagaagaacatttaaagaaaaatattcctcttgggaggtttggagaaactattgaggtggcacatgcggttgtgtttcttttagaatcaccgtatattacagggcatgttctggtagtggatgggggattacaactcattttgtaatttgcagattattcagttataggggtgattagcatcaagggcacactttggctactgattagacaattatacctacatgggtaacatgtgctaatcaaacctgctgatgctacaaatgttaatttctgtctttataaaaatatgtctcaaaagaacaatgtgtgacaaattgtggttttttttttttgggtcaaagcaacatcagggtggtttggttaaaaaagcctttatgaaatacaattcacatact

SEQ ID NO: 97 - DNA, 1216 bp, Homo sapiens
  CDS (201)..(791)
ccattgtatgcgatacccagctggctagcgtttaaacttaagcttggtaccgagctcggatccactagtccagtgtggtggaattcgtcaccagagaagtcttggtggaaacgtatgaagagagtgtgcctgtgtccagttaccagcaggcaggaattcccgtggacttgaaaaggaagattgcacggctggggatcaacatgctcctgaagatgatatttgtggataactttgtccatgcagaccttcaccctggaaacatcctggttcagggtgccaacggcctgtcctcgagtcaggaggcgcagctgcagcaggcggacatctgtgacactctggtggtggccgtgccatcttccctctgcccgctgcgactggtgctgctggatgctggcattgtggcggagctgcaggcccctgacctgaggaatttccgggcagttttcatggctgtggtgatggggcagggccagagagtggctgagctgatcctgcatcatgcccgggccagcgagtgcagggacgtggaggggttcaaaaccgagatggccatgctggtgacccaggccaggaagaacaccatcaccctggagaagcttcatgtgtccagccttctctctagtgtctttaagttgctgatgactcacaaggtaaagcttgagagcaactttgcctccattgtgtttgccatcatggtgttggaggggcttggccgctcactggaccccaaactggacatcctggaggcagcgaggcccttcctcctcacgggcccagtgtgccccccgtgatggggcagtggcctctgtgggcccttgtcaagagctggaggccactcccaagagcctctcctatggcagctgggacgttttaaaattgggacaccaatttcaaatgtaaccctccagtggtggaaggcacaccatggcttcctctgcttggtttgagggtctgttcaaaagctttgggccaattagggagtaaaaggagggaaggggcctatccattccattgtggaagctgggccaggtgccagggacactctccttcagggaaaatgttatgtggaggaggacgaataaatttattttgttttaaaaaaaaaaaaaaaaggggcggccgttttaaaggatccaagtttacgtccgcgtgcttgcaacgtaatattttttctatggggccaccaaaattcaattcactgcccgtcgtttaacaa

SEQ ID NO: 98 - DNA, 972 bp, Homo sapiens
  CDS (243)..(971)
catttgaagctttacgcctgccgtaccggtccggaattcccgggtcgacgatttcgtggaagctgatgtgttattccttctctgcatcgaaggatcaggaagtttgtgctctctgcgtggctaagtttttcacctactaggacgggggtggggtggggagaacaggtgtccttctaaaatacagcacaagctacagcctgcgtccagccataacccaggagtaacatcagaaacaggtgagaatgaccactttaactcaccgggcccgtcgcactgaaataagcaagaactctgaaaagaagatggaaagtgaggaagacagtaattgggagaaaagtccagacaatgaagattctggagactctaaggatatccgccttactcttatggaagaagtattgcttctgggactaaaagataaagaggggtacacatctttctggaatgactgcatatcatcaggcctgcgagggggcatcctgatagagctggccatgcggggtcgaatctatctggaacccccgaccatgcgtaagaagcgactactagacagaaaggtactgctaaagtcagacagcccaacaggtgatgttttactggatgaaactctgaaacacatcaaagcaactgaacccacagaaactgtccaaacatggatagagctactcactggtgagacctggaaccccttcaaattacagtaccagctgagaaatgtacgagagcgcatcgcaaagaacctagtagagaaaggtattctaaccactgagaagcagaatttcctgctatttgacatgactactcatccagtgaccaatacaacagagaaacagcgactagtgaaaaaacttcaagatagtgtactagagcggtgggtaaatgaccctcagcgtatggacaagcgaacactagcactcctggtgctagcccactcctctgatgtgctagagaatgtcttctcctctctgacag

SEQ ID NO: 99 - DNA, 1644 bp, Homo sapiens
  CDS (249)..(1535)
  misc_feature (1)...(1644): n = a,t,c or g
atcctcgcgggtccacgatttcgtcccgcggtcccacggcgcctggttgcccccagccccctccctcctcccaccttcattgtgtcccacccttcctagctttgtgcccggggtgctgagcccttccccgtcagccgggccgcgggaggagggagccgtcaccgaggagctgccgctcgctgccccgggcaggggcacaggcttcatccagtgaatactagagggattgtacagttgcaaccaaggcaatgtcttactacctcagctcagaaaaccacctggacccagggcccatctacatgcgagaaaatgggcagctgcacatggtcaatctggctctggatggtgtcaggagtagcctgcagaagccaaggcctttcagactgttccccaaaggcttttctgtggagctttgcatgaacagggaagacgacactgcacggaaagagaagactgatcatttcatcttcacatacacccgagaggggaatcttcggtactccgccaaatccctcttcagccttgtcctgggtttcatctccgacaatgtggatcacattgattcccttattggctttcctgagcagattgctgaaaagctgttctctgctgctgaagccagacagaaattcactgagccaggtgcagggctgagggctttacagaaattcactgaggcctatggaagtttggtgctttgctccctgtgtttgcgaaacaggtatctcgtgatttcagaaaagcttgaggagattaagtctttccgggagctgacctgcctggatctttcctgttgcaagcttggagatgagcatgaacttctagaacatctcaccaatgaagccctgtctagtgtaactcagctccacctgaaggataattgtttatctgatgctggggtgcggaagatgacagcaccagttcgagtgatgaaaagaggccttgagaatctaacattattagacttatcatgtaaccctgagatcacagatgcaggcattggatacctctttttttttaggaaactaaactgcttagatatctctgggacagggctcaaggacatcaaaaccgtcaagcacaagctccagacccacataggccttgttcactccaaagtgcctttgaaggaatttgatcatagtaactgcaagacagagggctgggctgaccagatcgttctgcagtgggagcgtgtgactgcggaagctgtgaagccacgggagacctcggagcctagagcagcagctcagcgcttctatgggaagcggtctcgagcagaagccccactgaagtgtcccctggcagacacccacatgaactcttccgagaaactccagttctataaagagaaagccccagattgccatgggccagtgttgaaacacgaagctatctcaagccaggagtcaaagaagagcaagaagagaccttttgaggagtcagagacagaacagaataactcttcacaaccttcaaagcagaaatatgtatgtcttgctgtggaagactgggacttgttaaattcctattgattagtagatacaagttgacctttctctggcccccagctctagtgtttgagtaaaggagactgaggatgatttacttttggttgaatntacctatggcattagcatagta

SEQ ID NO: 100 - DNA, 490 bp, Homo sapiens
  CDS (120)..(446)
cgatgtataaatgaaagaaattgagatggtgcacgatgcacagttgaagtgaacttgcggggtttttcagtatctacgattcatagatctggaattcgcggcgcgtcgacgtcaccgccatggctgccccgtgtttgctgcggcaaggacgagccggggcgctgaagactatgctccaggaagcccaggtgtttcgaggacttgcttctacggtttctttgtctgcggaatcagggaagagtgaaaagggtcagccacagaattccaagaagcaaagtccaccaaaaaagccagccccagtgcctgctgagccgtttgacaacactacctacaagaacctgcagcatcatgactacagcacgtacaccttcttagacctcaacctcgaactctcaaaattcaggatgcctcagccctcctcaggccgggagtcacctcgacactgagggccctcggtgtgaagatgaaccttccaccgtcttcactgcat

SEQ ID NO: 101 - DNA, 553 bp, Homo sapiens
  CDS (120)..(509)
cgatgtataaatgaaagaaattgagatggtgcacgatgcacagttgaagtgaacttgcggggtttttcagtatctacgattcatagatctggaattcgcggcgcgtcgacgtcaccgccatggctgccccgtgtttgctgcggcaaggacgagccggggcgctgaagactatgctccaggaagcccaggtgtttcgaggacttgcttctacggtttctttgtctgcggaatcagggaagagtgaaaagggtcagccacagaattccaagaagcaaagtccaccaaaaagtgtccctacaccacaccgaagatactcaccttgtggagattggaaggatgccagctctttaaagccagccccagtgcctgctgagccgtttgacaacactacctacaagaacctgcagcatcatgactacagcacgtacaccttcttagacctcaacctcgaactctcaaaattcaggatgcctcagccctcctcaggccgggagtcacctcgacactgagggccctcggtgtgaagatgaaccttccaccgtcttcactgcat

SEQ ID NO: 102 - DNA, 470 bp, Homo sapiens
  CDS (137)..(253)
gggggggggaatatggactttatggctcaagtgcaaactctgatgatgtccagtcagtatgaggctgcattgaagaaggcgaacctgaaaggctacggccgataattggtcgcccgagaagttacggagagtaaaaatgaaagttcgtgcttccgtcaagaaattatgccgtaactgcaaaatcgttaagcgtgatggtgtcatccgtgtgatttgcagtgccgagccgaagcataaacagcgccaaggctgattttttcgcatatttttcttgcaaagttgggttgagctggctagattagccagccaatcttttgtatgtctgtgcgtttccatttgagtatcctgaaaacgggcttttcagcatggaacgtacatattaaacagtaggagtaaatagggtcccgcaaagcaggccccagcattcctgttctccgggtacggacatagaatccgtaatgatggtcaca

SEQ ID NO: 103 - DNA, 637 bp, Homo sapiens
  CDS (379)..(576)
atctgcaccgcgtcagtgctcgccgggctatatccagcaaaggcagtacccgcgaaacagcgagtgatgtcgtagccactttgggagtgcagtgatgatgaagctgattaatcgcagtaagcaatcacctattggtcgccgcgcttgcgatgttgcgctggcagctcacttgcaaacatatggcgactatgggcgaagcaagatgaaagagacttatacggtgaaggttgaaggcgtgaaagtctgggtggaggtggtgaaccgaaaggcgagctacgtggccacagcgatgaccggcatgcgccgtctccgctccctgcccgggcaggttggttgaaaaagattttgaatggcccgaacgggcaactggagagagctatggatgatattttggtaacgtcagacctgaccagtcgctacaaaatttcacgcaaaaccctttggtcatggcaaagtgcagacacaatgcctcggggcttcgtatgcccgttcccaccccctgactggcccggcaaccctaaccgctggcgctctgagtcaatcaaagagtgggaggataaaaagaagataaattaactgaagggctctccgatgatctcttcaagatggctctgccaaacgcggagccagtgtttct

SEQ ID NO: 104 - DNA, 2015 bp, Homo sapiens
  CDS (162)..(707)
ggatgagtcgtcgctgcacgaccggtccggaattcccgggtcgacgatttcgtccgtctggcaggccgcgtggcgcccgcgccggccttcctgcaggggactccaccggagccttgccaattccgtttgtttccctgttgtcgcccgcttcaccctggatcatgttcaagaagtttgatgaaaaggaaagtgtgtccaactgcatccagttgaaaacgtcagttattaagggcattaagagccaactggtagagcaatttccaggtattgaaccatggcttaatcaaatcatgcctaagaaagatcctgtcaaaatagtccgatgccacgaacatacagaaatccttaccgtaagtggggaattattgttttttagacaaagaaaggggcctttttgtccaactctaaggttgcttcacaaatacccttttatcctgccacaccagcaggttgataaaggagctatcaaatttgtactcagtggcgcaaatattatgtgtccaggtttaacttctcctggagctaagctgtaccctgctgcagtagatacgattgtagcagtcacagcggaaggaaaacagcatgctctgtgtgttggggtcatgaagatgtctgcagaagatattgagaaagtcaacaaaggaattggcattgaaaatatccattatttaaatgatgggctgtggcacatgaagacatataaatgagcctcagaaggaatgcatttggggggctaaatgtggatattgattgtgtcgtatgtgtgtttgtgtctgtgtgtgacagcgtgaatacaatgcctctgtggttatgctaaataagtttaacagatactttatagaaaacaaatcagggtgctcttaccacagatgaaaaaacaaattaggggacaagcagcaagcagtctgctaacactctggaatgtgaaaggagtgtctggactctgtgactcccggcaaactccacagcctctagttgtcttcttaggaagcttggaagcaattgagaatggtctaacatcaagatgtctaccacagggccccccacaaaagcagcctcggggactccggcctttccttgagacctgcatctcttcccttcttcatcgcctgctagtgaactgaggctgccgctaaccttcttcatcctttggtggcaaagtagaaagattccagaattaactcgacctttctaaagacctgggctcagaggcagctggcactgactgagcacccactatgtgccaggcactgtgctgaatgcattagatcatcaattatgaatttgacaccaaggacctggtgtgcctgggcctgagcagcatcgttggcgtctggtacctgctgaggaagcactggattgccaacaacctttttggcctggccttctcccttaatggagtagagctcctgcacctcaacaatgtcagcactggctgcatcctgctgggcggactcttcatctacgatgtcttctgggtatttggcaccaatgtgatggtgacagtggccaagtccttcgaggcaccaataaaatgtgacaaaactaaggcagtggtgtttccccaggatctgctggagaaaggcctcgaagcaaacaactttgccatgctgggacttggagatgtcgtcattccagggatcttcattgccttgctgctgcgctttgacatcagcttgaagaagaatacccacacctacttctacaccagctttgcagcctacatcttcggcctgggccttaccatcttcatcatgcacatcttcaagcatgctcagcctgccctcctatacctggtccccgcctgcatcggttttcctgtcctggtggcgctggccaagggagaagtgacagagatgttcagctacgagtcctcggcggaaatcctgcctcataccccgaggctcacccacttccccacagtctcgggctccccagccagcctggccgactccatgcagcagaagctagctggccctcgccgccggcgcccgcagaatcccagcgccatgtaa

SEQ ID NO: 105 - DNA, 2769 bp, Homo sapiens
  CDS (362)..(1222)
ggcgcgagttgaacccttgatcgcctgcggtaccggtccggaattcccgggtcgacccacgcgtccggctacctagtgggtcttggggaccttcgaaatcgccgccgctctcacaatggcttgggtccagactgcgccacagcctctcgggagacgtgggccctcggaacctttttagtgccggactccgggccgcaggcagtcccgcggcagcaggatcacagaacctctggatggactcttcctgggaagctttgctactttgcagcagctggaccatgttcctcattaacatctgtctgtccgcttagtcatcacatcatttcactgtgctcttgaggctagtgcgcctctaggcaagatgtccctgcccatcgggatataccgccgggcagtcagctatgatgataccctcgaggaccctgcgcccatgactcctcctccatcggacatgggcagcgtcccttggaagccagtgattccagagcgcaagtatcagcacctcgccaaggtggaggaaggagaggccagtctaccctcccctgccatgaccctgtcatcagccattgacagtgtggacaaggtcccagtggtgaaggctaaagctacccatgtcatcatgaattctctgatcacaaaacagacccaggaaagcattcagcattttgagcgacaggcagggctgagagatgctggctacacaccccacaagggcctcaccaccgaggagaccaagtaccttcgagtggccgaagcactccacaaactaaagttacagagtggagaggtaacaaaagaagagaggcagcctgcatcagcccagtccaccccaagcaccactccgcactcttcacctaagcagaggcccaggggctggttcacttctggttcttccacagccttacctggcccaaatcctagcaccatggactctggaagtggggataaggacagaaacttgtcagataagtggagcctctttggaccgagatcccttcagaagtacgattctggaagttttgccacccaggcctaccgaggagcccagaagccctctccattggaactgatacgtgcccaggccaaccgaatggctgaagatccagcagccttgaagccccccaagatggacatcccagtgatggaaggaaagaaacagccaccacgggcccataacctcaaaccccgtgacctgaatgtgctcacacccactggcttctagagccctctttccagggattctggtaaaggtggtttcttgcatcccactccccttttaccttggctttgacataggaaaggtatatttaaaaacttaatcagctgggcgtggtggctcacgcctgtaatcccagcactttgggaggccaaggtaggtggatacctgaggtcaggagttcaagaccagcctggccaacatggtgaaaccccgtctctactaaaaatacaaaaattagctgggcgtggtggtgggcgcctgtagtcccagctacttgggaggctgaggcaggagaatcgcctgaacccaggaagcagatgttgtaccgagctgagatcatgccattacactccagcctgggcgacagaacgagacgccatcaataaataaataaataaagtaaagtaaaaaacctattaaattgaggctagagctggagatgtaattggtttttgagaaacattagtataaagcttgcccttgttgtgtggaagaagccattttgtactgctttaaagttagactaatattctcagcacgggtgtatggggacctcattacctatttttttcatcatttaccctaggtaagaactttgatcactgcttactaggtaaagaatgtttgtactgttccaaaacccaggcttctttattcctttaccactatccatgtgagcattgacaaatcatggcttagaggtgctcactgactcgctaagacgactttggccctgttgatgactggtgctgtgctccagccttatcagttaggggacccaaggtttgtttgggacctgggtacaggtaaaagccagacttggcagggacccctctttctaggctgaaccttgagtccccctgctttttggcagacctaatggatcactgtcttgcagctagttcttcatgtggggcctcttaggccagtgccggaggaggcatgctcctctttctatgccacagaacaaacactactctagcagagcctttcttgcactttaaagtgagattaatttagctgtaatttggttaaaaacttcctaagagagaaaattaagtctactgatttggtataggtaaatggacattaaacttttttaaagtaaaggagatggtagataccgttagattatagtcttgaggttcatgtgaagccagtggtgttaacttactttgatttccttgttcaggtcagggcctggaacgcctgtgcggggaggtcactcaattcaaaattttctgtatgaaagcatttttcaccaaaatgagcctcatccctttatgcaacacataaccttactgagggagggaaatacagaagccacctttttatttctcttcactgtgtacaagttcacttgttgtcttgaacactgtctcaaatacctgctttttgttttggatagtaccttgtctgtataagaagctggcctttccatagagaggccctggagtctaaaattatgagaacaattaatttatttgtgtcttctattatgatctcgttttgacaataaaaatccttactactttctcaaaaaaaaaaaa

SEQ ID NO: 106 - DNA, 7037 bp, Homo sapiens
  CDS (9)..(4922)
ccacctccatgtgtacggcagaacagttccgctgtcactcaggccgctgtgtccgcctgtcctggcgctgtgatggggaggacgactgtgcagacaacagcgatgaagagaactgtgagaatacaggaagcccccaatgtgccttggaccagttcctgtgttggaatgggcgctgcattgggcagaggaagctgtgcaacggggtcaacgactgtggtgacaacagcgacgaaagcccacagcagaattgccggccccggacgggtgaggagaactgcaatgttaacaacggtggctgtgcccagaagtgccagatggtgcggggggcagtgcagtgtacctgccacacaggctaccggctcacagaggatgggcacacgtgccaagatgtgaatgaatgtgccgaggaggggtattgcagccagggctgcaccaacagcgaaggggctttccaatgctggtgtgaaacaggctatgaactacggcccgaccggcgcagctgcaaggctctggggccagagcctgtgctgctgttcgccaatcgcatcgacatccggcaggtgctgccacaccgctctgagtacacactgctgcttaacaacctggagaatgccattgcccttgatttccaccaccgccgcgagcttgtcttctggtcagatgtcaccctggaccggatcctccgtgccaacctcaacggcagcaacgtggaggaggttgtgtctactgggctggagagcccagggggcctggctgtggattgggtccatgacaaactctactggaccgactcaggcacctcgaggattgaggtggccaatctggacggggcccaccggaaggtgttgctgtggcagaacctggagaagccccgggccattgccttgcatcccatggagggtaccatttactggacagactggggcaacaccccccgtattgaggcctccagcatggatggctctggacgccgcatcattgccgatacccatctcttctggcccaatggcctcaccatcgactatgccgggcgccgtatgtactgggtggatgctaagcaccatgtcatcgagagggccaatctggatgggagtcaccgtaaggctgtcattagccagggcctcccgcatcccttcgccatcacagtgtttgaagacagcctgtactggacagactggcacaccaagagcatcaatagcgctaacaaatttacggggaagaaccaggaaatcattcgcaacaaactccacttccctatggacatccacaccttgcacccccagcgccaacctgcagggaaaaaccgctgtggggacaacaacggaggctgcacgcacctgtgtctgcccagtggccagaactacacctgtgcctgccccactggcttccgcaagatcagcagccacgcctgtgcccagagtcttgacaagttcctgctttttgcccgaaggatggacatccgtcgaatcagctttgacacagaggacctgtctgatgatgtcatcccactggctgacgtgcgcagtgctgtggcccttgactgggactcccgggatgaccacgtgtactggacagatgtcagcactgataccatcagcagggccaagtgggatggaacaggacaggaggtggtagtggataccagtttggagagcccagctggcctggccattgattgggtcaccaacaaactgtactggacagatgcaggtacagaccggattgaagtagccaacacagatggcagcatgagaacagtactcatctgggagaaccttgatcgtcctcgggacatcgtggtggaacccatgggcgggtacatgtattggactgactggggtgcgagccccaagattgaacgagctggcatggatgcctcaggccgccaagtcattatctcttctaatctgacctggcctaatgggttagctattgattatgggtcccagcgtctatactgggctgacgccggcatgaagacaattgaatttgctggactggatggcagtaagaggaaggtgctgattggaagccagctcccccacccatttgggctgaccctctatggagagcgcatctattggactgactggcagaccaagagcatacagagcgctgaccggctgacagggctggaccgggagactctgcaggagaacctggaaaacctaatggacatccatgtcttccaccgccgccggcccccagtgtctacaccatgtgctatggagaatggcggctgtagccacctgtgtcttaggtccccaaatccaagcggattcagctgtacctgccccacaggcatcaacctgctgtctgatggcaagacctgctcaccaggcatgaacagtttcctcatcttcgccaggaggatagacattcgcatggtctccctggacatcccttattttgctgatgtggtggtaccaatcaacattaccatgaagaacaccattgccgttggagtagacccccaggaaggaaaggtgtactggtctgacagcacactgcacaggatcagtcgtgccaatctggatggctcacagcatgaggacatcatcaccacagggctacagaccacagatgggctcgcggttgatgccattggccggaaagtatactggacagacacgggaacaaaccggattgaagtgggcaacctggacgggtccatgcggaaagtgttggtgtggcagaaccttgacagtccccgggccatcgtactgtaccatgagatggggtttatgtactggacagactggggggagaatgccaagttagagcggtccggaatggatggctcagaccgcgcggtgctcatcaacaacaacctaggatggcccaatggactgactgtggacaaggccagctcccaactgctatgggccgatgcccacaccgagcgaattgaggctgctgacctgaatggtgccaatcggcatacattggtgtcaccggtgcagcacccatatggcctcaccctgctcgactcctatatctactggactgactggcagactcggagcatccaccgtgctgacaagggtactggcagcaatgtcatcctcgtgaggtccaacctgccaggcctcatggacatgcaggctgtggaccgggcacagccactaggttttaacaagtgcggctcgagaaatggcggctgctcccacctctgcttgcctcggccttctggcttctcctgtgcctgccccactggcatccagctgaagggagatgggaagacctgtgatccctctcctgagacctacctgctcttctccagccgtggctccatccggcgtatctcactggacaccagtgaccacaccgatgtgcatgtccctgttcctgagctcaacaatgtcatctccctggactatgacagcgtggatggaaaggtctattacacagatgtgttcctggatgttatcaggcgagcagacctgaacggcagcaacatggagacagtgatcgggcgagggctgaagaccactgacgggctggcagtggactgggtggccaggaacctgtactggacagacacaggtcgaaataccattgaggcgtccaggctggatggttcctgccgcaaagtactgatcaacaatagcctggatgagccccgggccattgctgttttccccaggaaggggtacctcttctggacagactggggccacattgccaagatcgaacgggcaaacttggatggttctgagcggaaggtcctcatcaacacagacctgggttggcccaatggccttaccctggactatgatacccgcaggatctactgggtggatgcgcatctggaccggatcgagagtgctgacctcaatgggaaactgcggcaggtcttggtcggccatgtgtcccacccctttgccctcacacagcaagacaggtggatctactggacagactggcagaccaagtcaatccagcgtgttgacaaatactcaggccggaacaaggagacagtgctggcaaatgtggaaggactcatggatatcatcgtggtttcccctcagcggcagacagggaccaatgcctgtggtgtgaacaatggtggctgcacccacctctgctttgccagagcctcggacttcgtatgtgcctgtcctgacgaacctgatagccggccctgctcccttgtgcctggcctggtaccaccagctcctagggctactggcatgagtgaaaagagcccagtgctacccaacacaccacctaccaccttgtattcttcaaccacccggacccgcacgtctctggaggaggtggaaggaagatgctctgaaagggatgccaggctgggcctctgtgcacgttccaatgacgctgttcctgctgctccaggggaaggacttcatatcagctacgccattggtggactcctcagtattctgctgattttggtggtgattgcagctttgatgctgtacagacacaaaaaatccaagttcactgatcctggaatggggaacctcacctacagcaacccctcctaccgaacatccacacaggaagtgaagattgaagcaatccccaaaccagccatgtacaaccagctgtgctataagaaagagggagggcctgaccataactacaccaaggagaagatcaagatcgtagagggaatctgcctcctgtctggggatgatgctgagtgggatgacctcaagcaactgcgaagctcacgggggggcctcctccgggatcatgtatgcatgaagacagacacggtgtccatccaggccagctctggctccctggatgacacagagatggagcagctgttacaggaagagcagtctgagtgtagcagcgtccatactgcagccactccagaaagacgaggctctctgccagacacgggctggaaacatgaacgcaagctctcctcagagagccaggtctaaatgcccacattctcttccctgcctgcctgttccttctcctttatggacgtctagtccttgtgctcgcttacaccgcaggccccgcttctgtgtgcttgtcctcctcctcctcccaccccataactgttcctaagccttcaccggagctgtttaccacgtgagtccataactacctgtgcacaagaaatgatggcacatcacgagaatttagacctggattttaccatgaacctcacatcttgtactccatcctgggccccctgaaactgcttattcgtgattcctcaccagcgtagagctccacctcccctttccccagtaccctcagtgcctgcttctcagtgctgatgcagctgatgacccaggactgcgctctgccccatcacagccagcatgactgcttctctgagagaacttgcccatcaggggctgggacatgggggtgtgggtaaagacagggatgaaggatagaggctgagagaagaaggaagaatcagcccagcaggtatgggcatctgggaaacctccagcctcaagtgtgttggtaacatgaaaaagctctggggggtagttggatctgggtgtctggtccattgctggcagtggacattattcttgccctaagagacactgccttttcagcagcagatactggtgagatgggggtggctcaggctgttcttcctcctcctagaatgtctggagctgtttctacattcagataactgggtcccctatcacaaggctactggctaataggaattccctcctggtgccaccactggccagtacctttcctaagtctttgctcaaattaaccaggttgtgagccagtggcttgagtgaatgttaggccttgggggctgagtctctgaaaagtctaagaagctctgcctagaccaaatatggtatacctcctgacccctctctccctcatgtcctgggattctggggaagagacctagaaacaagctttcaaagaaaaaccagaagttgtcataaatggtcagaaagaacgatcaggttggagacttgggaaacccagggcctaaagagaagtatccatgagggtcaaacttcctgttgaacttcctatgttctttctcaagtgctcagggatctaagttagtggacagcaagcctgtggctacggggtggtgatgttcctcttccagctgtcccctcagctaaggggcttagtttccatgtgggatgccatcacttggttcatgctcattcacacaaagggcacgtgtctcagcctggtatcagggaaattgagacttatttttgccctaaaacgtctccctagctgttcttcgtggggtttttttgtttgtttttttgcctaatttgctttttctgaccaagccttgtggcaccagcaatctccaaagtcctgtggtgggagggctgaataaataaaaatacaaagaggtgggtaaggagtaggaaggtagagagcaccactgatgaggccctcctagcccatggcagacccagacctcttctcccccaggaattagaagtggcaggagagaacaacaggggctgggaatggaggggagaatttctaggggaagtttcctgagttgaaacttctcctgtggttactggtattgagaaatcagctaccaaagtgaaaaaggacaagatcaattcttttctagtcagttctaagactgctagagagagataccaggcccttagccttgctctcagtagcgtcagccccagttctgagcctccccacattacacttaacaagcagtaaaggagtgagcactttgggtccttagactcatgtctggggaggaagagcaagtagaaaagtggcattttcttgattggaaagggggaaggatcttattgcacttgggctgttcagaatgtagaaaggacatatttgaggaagtatctatttgagcactgatttactctgtaaaaagcaaaatctctctgtcctaaactaatggaagcgattctcccatgctcatgtgtaatggttttaacgttactcactggagagattggactttctggagttatttaaccactatgttcagtattttaggactttatgataatttaatataaatttagcttttcttaatc

SEQ ID NO: 107 - DNA, 6875 bp, Homo sapiens
  CDS (46)..(1998)
ggtaccggtccggaattcccgggtcgacgatttcgtggcgagaagatggcgacttcgaacaatccgcggaaattcagcgagaagatcgcgctgcacaatcagaagcaggcggaggagacggcggccttcgaggaggtcatgaaggacctgagcctgacgcgggccgcgcggctccagctccagaaatcccagtacctgcaactgggccccagccgaggccagtactatggcgggtccctgcccaacgtgaaccagatcgggagtggcaccatggacctgcccttccagcccagcggatttctgggggaggccctggcagcggctcctgtctctctgacccccttccaatcctcgggcctggacaccagccggaccacccggcaccatgggctggtggacagggtgtaccgggagcgtggccggctcggctccccacaccgccggcccctgtcagtggacaaacacggacggcaggccgacagctgcccctatggcaccatgtacctctcaccacccgcggacaccagctggagaaggaccaattctgactccgccctgcaccagagcacaatgacgcccacgcagccagaatcctttagcagtgggtcccaggacgtgcaccagaaaagagtcttactgttaacagtcccaggaatggaagagaccacatcagaggcagacaaaaacctttccaagcaagcatgggacaccaagaagacggggtccaggcccaagtcctgtgaggtccccggaatcaacatcttcccgtctgccgaccaggaaaacactacagccctgatccccgccacccacaacacaggggggtccctgcccgacctgaccaacatccacttcccctccccgctcccgaccccgctggaccccgaggagcccaccttccctgcactgagcagctccagcagcaccggcaacctcgcggccaacctgacgcacctgggcatcggtggcgccggccagggaatgagcacacctggctcctctccacagcaccgcccagctggcgtcagccccctgtccctgagcacagaggcaaggcgtcagcaggcatcgcccaccctgtccccgctgtcacccatcactcaggctgtagccatggacgccctgtctctggagcagcagctgccctacgccttcttcacccaggcgggctcccagcagccaccgccgcagccccagcccccgccgcctcctccacccgcgtcccagcagccaccacccccgccacccccacaggcgcccgtccgcctgccccctggtggccccctgttgcccagcgccagcctgactcgtgggccacagccgcccccgcttgcagtcacggtaccgtcctctctcccccagtcccccccagagaaccctggccagccatcgatggggatcgacatcgcctcggcgccggctctgcagcagtaccgcactagcgccggctccccggccaaccagtctcccacctcgccagtctccaatcaaggcttctccccagggagctccccgcaacacacttccaccctgggcagcgtgtttggggacgcgtactatgagcagcagatggcggccaggcaggccaatgctctgtcccaccagctggagcagttcaacatgatggagaacgccatcagctccagcagcctgtacagcccgggctccacactcaactactcgcaggcggccatgatgggcctcacgggcagccacgggagcctgccggactcgcagcaactgggatacgccagccacagtggcatccccaacatcatcctcacagtgacaggagagtccccccccagcctctctaaagaactgaccagctctctggccggggtcggcgacgtcagcttcgactccgacagccagtttcccctggacgaactcaagatcgaccccctgaccctcgacggactgcacatgctcaacgaccccgacatggttctggccgacccagccaccgaggacaccttccggatggaccgcctgtgagcgggcacgccggcaccctgccgctcagccgtcccgacggcgcctccccagcccggggacggccgtgctccgtccctcgccaacggccgagcttgtgattctgagcttgcaatgccgccaagcgccccccgccagcccgcccccggttgtccacctcccgcgaagcccaatcgcgaggccgcgagccgggccgtccacccacccgcccgcccagggctgggctgggatcggaggccgtgagcctcccgcccctgcagaccctccctgcactggctccctcgcccccagccccggggcctgagccgtcccctgtaagatgcgggaagtgtcagctcccggcgtggcgggcaggctcaggggaggggcgcgcatggtccgccagggctgtgggccgtggcgcattttccgactgtttgtccagctctcactgccttccttggttcccggtcccccagcccatccgccatccccagcccgtggtcaggtagagagtgagccccacgccgccccagggaggaggcgccagagcgcggggcagacgcaaagtgaaataaacactattttgacggctgtcttttatatttctgagcacacacagagccctggcgtccaccggggcaggcgcaaagtggacagagcatgcagggcggcggacccccccacgaccctcctcgccctgtctccatcccctcgaagccctgcctcaccgcaggcaggcccatcggtggccacctttgccgggaagtgaccggaaggccccgtgaggggtcgaacgcggaggcaggggttacctcttggggctttacaatccgtggcccctcctgtcctgcactgtggtcaccggtcctgtcatagatgctgttaatttaaggtacaggcagaggtggccaggggagtttcattgtggtttttctttccttttagtttctagttacattttggttgtagatgactcgcttaatcttttaagccaacacttgcctgagagcatgtttttatttcagaaatccaactttacctattttttaagctaactggaaatggaggccatgcgccccaaagcagcccgccacccacctgagtgtaagaagtgagtccggcttttgggtttcaccccaagttatctcaaaacaaaagggctggtcaggctgggcagggccttgtcaggagctcacggtaggcagaggtgcctctgccagggccacagaacagacttccgggaaggggccttggcttttattgagggtctctcaaagacccagcctgccagcctctcccagaggtgcctgctagtccttagagtgtgtgtgtgaagatgccatgaccagtggcagctgagacctctctgccccaagagtgtgggggactggcagggagcgagggtccccgagacgaggaccacggtcctccctgagaacctgggtggaactggcatttcatcccctctccaccctaccctctggctcctagcccacaccccctctcttgggcagcgtggtctgctggctgccccttcttggcagctcagggtcgtggcaggtggacttggagacacacagcagtgtgtgttttagtggcaggtttcaggagcacctctaagaccagggtgacagggtacttgggagctgtcctggaccctccccataccacgggccctgcaagggaggcatcagggctggctttgttttctgctgttcttggaataggaactgctgttctgatccccccaaaactgcattgcggctctcgctcgctcctgcctgccgggacagcgccttctgctgagtccgtttatttgtagtgtcatggctgctgctttcactggggtcctgggcaccctggcttctgtcctcagagctgggtttgatcctagcaaccatcccttcctctctttgcccggcaatgcctttggcatgtgtctgagcagccaagtggccactcataggagaaggctccctggtcacgttgctcctgctgccgtcttgttccaaggtgcgggggggacactgttggtctgtccaggtcaaggtccctttctcttaccatgacagaggctgggggcagacagcggggacttttttttttttttaagaaaaactacatgtacataggagagtttcattaccattagacttgtatgtaggacttaaaaaaaaatggccttaataaaattacaagcaacccgcctggatgcggttttcaaaagaaggcattgaggaccatgctaggaaacctcataccccatccgtccaacctccggcgggcgccactgcttgtcctctggtcttcggtgtggacagataggagaggagggatgcccacctcggagcatcccaggcccgtggcccattttcagcatcctgaagccagattcacagtgacattgtgttaacgtgacgaccttggtccattatggagttctttttccaataagaacctggtggaccgaggtccgagcttgccagggacagtggggcccacgcgagtacccggggcccagccaggagccagcagccaggcgtccctgtgttccagaaggattcacgcccctcctggacctgggcgggcctcccagggggtctgtatcacggccttttgtgtgtgcgtacgtgtggtttttttaaatatcactactacatattcttgaattgccaagactttctgaaacaagacagcttaagggaatcagccttttgctttgtgatgtgaaaatactgtgatttgacgagccgcttcctgaggggcaggcccacgtggggaggttgcgccgtgtacatagacccgccgtctgtgtccttggtcaggcccggatgcttggtctacactgggttagaggctgctctccccacgcacccatgtgctcatggcttctgcagaccctctgctgggtacatcggtcccctacggcgaagttcagccagggctctccctcctgagagcatggcgtccccaccttcctgtttcgccgacgtcactacccagggtggcaagtcttgcaggcagagggtgtagcccaagttcagcctctctctgtgtcctccagagaagagggttctttgccctcatcagggccctgcttgtgggttttcggctctggggaggagagtgttggcatcagtgtgtttggcctgatttcttcagggggccaagctcccgggaggacccctagccaggagggccccccatgtccatccatccctcctgctggggcttggatgtcaggcttgggggctgtgagctgggacctcgcctgagcccggtcaggtgggacaggagcctgccagaagcccatggggggccaggccgggtggcttctattttatttttttagagatggggtcttgctgtgttgcccaggctggtctcggactcctgggctcaagcagtcctccctcctcggcctcccaaagttctggggctacaggtgtgagccacttctgcccagcatcccaggcctgaacagccttggcaggacccgtccctagagggggctctggtgcctcccttaggtgggccttgagctggtttttaaccaaacatccttccaaactcgggctgcgacctgcttcctgagttttctgtatttccaaggagccctccgaccagggagaggctggtggagtaaggtccagcggtattcgggggtcctctgtcacctcgccctgaaaacagcagctcccatcaccttcactgggtcccgatggagccgtctcagaggccgaggggccctctgtgtgggggtgggacgcaggggctctcagagcaagggccacaaagccgatggcacagatgtgcccctgggcctggcccgtcacccacatgtggtgccctgggccagggcgtgcgggcgccagagccttccctacacagcctaagagcaggggcaagactcggcccctcactcaccctgggaggcctgcctgggctacatggacacctgggtctctttctacccccattcaccatggaccaggggcctccatttcctgggggctcttgcggcatgtgatttgggggtccctgggacattctcccgtcagctccacctgagccaagtgtcctgttccctgcggcccttggccttccagggtcctggccaggcaggggtcaggcaccccatactcttccgtgtggcacaggtgtccacccacccccactggccacagacaccattctccccctgggagcaggaggtggagtaagttgtacccccaggcctgggtgctggggagttcctgagggcatgggtggggcaggagtgagtgcctcgtgatcccagcctcagtttctctcttgtcactttctcaaacctgcaggtctcagggccccgggctcctcctgggcaggatggggggcaggggctgggccttggggtggtgctggctctgatgattccagagcctgtatccaccttctgggctcctggccagcaccccacccccaggagccagggacaggtggcatgtgttggggtcgggggatggcccccatctcgaagtgttctggaatttgggggcaacccttgcccagcccagacatcaagaacttctgatctcctgcccaccaggaggggacttagccatggacttggccagtaggcctggggagggagggctttggcagccaaagtccactggccctgccgtgcccctgagtaggaaactgtcccctaggggctgggtggccccactgatatatgcaaacccgccggtccgagccctgttcctgcctgtgctcctctgtgcccaggctggctctcccccaaccctagcatgtatactctgccacggacgtcccgtgggccatgattgtgggcggccgctctagaggatccctcgaggggcccaagcttacgcgtgcatgcgacgtcatagctc

SEQ ID NO: 108 - DNA, 531 bp, Homo sapiens
  CDS (181)..(516)
  misc_feature (1)...(531): n = a,t,c or g
gagggaannntttgaagcttggatagccgatgtatatcactgtcgattcgacgatgaagataccccaccaaacccaaaaaaagagatctctcgaggatccgaattcgcggccgcgtcgaccgcaggagcctctgaagctcccaccaggccagctctcctcccacaacagcttcccacagcatgaagatctccgtggctgccattcccttcttcctcctcatcaccatcgccctagggaccaagactgaatcctcctcacggggaccttaccacccctcagagtgctgcttcacctacactacctacaagatcccgcgtcagcggattatggattactatgagaccaacagccagtgctccaagcccggaattgtcttcatcaccaaaaggggccattccgtctgtaccaaccccagtgacaagtgggtccaggactatatcaaggtcgacgcggccgcgaattcggatcctcgagagatctcttttttgggttggggggttcttctcatcgaatgatgttatatgcatcac
